United States Patent Application Publication US 2012/0046346 A1 - sequence listing, part 2

SEQ ID NO: 735 - DNA, 41369 bp, Homo sapiens
gatcacgccattgcactccagcctgggcaacgagcaaaactccgcctcaaaaaaaaaaaattaaaaaacagagcttggattgcttcttagtcttctggctaagaatcaagtgtaaaacagcttggccagtgtgccggggtagggtcctgggagcccctggctgtgtcaagagaccccctttgggccaggtgcggtggctcatgcctgtaatcccagcactttgggaggccaaggcaggcggatcacttgacgtcaggagttcaagactagcctggccaacatggtgaaactctgtctctaccaaaaatacaaaaattagcccggtgtggtggtgcatgcctgtagtcccagctactcaggaggctgaggcaggagaatcgtttgaacccgggaggtggaggttccagtgagccaagatggtgccactgcactccagcctgggcaacaagagtgaaactccgtctcaaaaaaagaaaaaaaaataggagacccccttttactttccagactgtgggagggaggaagagtgttgtcccaggcagtaactaggggctagattattaacaaactagtattttagtgcctgctacacctgaacagtgcttctggctgaatgttagccctgggaatctgaagatcagagaggtggggcatcctacctgaggatgcacagcctggatcctcattttgccctgatttatccagatctgctgtcctccctgcaccctacagagcagggcaatcacagcagggggccccttcagtgtcctcagacagctgctgtgatttgaataaccaggcaggctgctggatgtcccctggtgactgatttgcctggcaaacagaccctcaacccctgggagacagtccccctggggccttgtttcttcttcctatcctcaaaagctccccaggcccatctccccttgcctggctctgcttggtggtcctagtgcttgtccacccctggaggctggatggttccctccaaaacctgggagaagatgggcaggtccccaggcaggggtaacctgagccagcttagtccactcccagggccagccaggaaatttgcatgaagagaatgaggttcctcagaggcttcccctcctttcccaccagggatagtcatcctggggctgaggtctgacagcaggtggaagcagcccctgtgtgtggagagccttccggagggcatgccccgcgccttcctggtcaggagtcggcgtccacagccccccaactggggccatctgcctgaccagctccggggagatgcctatatcccaggtgggcccctcactgtgcctggaggtaaggggcaggagagacgcagtgtcaccatctggcttttctcctcagactgcagcagcctgggggggccaccggcacaacagtcgtccagtgtcagggatccgtggacagcggtgagtgtgtaactggctagcaaagccagctgtttcgctcctgcctgctctcagccttaatgaagctgacagccccttgctcccccgacccatctgcacacgccctccagcctcgggacctgtccgcccctacttctctgtgttgggaatgcctctcctttcctagtagtgagctctctactgttaggtctcaccccaggcaccagggccggcagccacagggatctcttccagcggggcacaagattcatccccacatgtggatgatccgctttatgtcagaacatgggacaaggcaacaggagtgcgatgggagataagggctttttcagctgtgcatgcattggaggaaggaaagcgccagccggaatgtaatatattcatgaaagcaaggcactgttctaggcatgggctgttatattcagcgggaataagacaaaaatccacaattttatggagcttatattctggttggggctgcatgtatagacaataaaattagtcagcctgtaattccagcactttgggaggccgaggcgggtgaatcacttgaggtcatgagttcgagaccaggctggccaacatgttgaaaccttgtctctactaaaattacaaacattagccagacatggtggcacgtgcctgtaatcccagctcctcaggaggctgaggcaggagaatcagttgaacctaggaggcagggcagaggatgcagtgagccgagtctgcgccactgcactccagcctgggaaacagatctagactccatcccccctcaaaaaaaacaataaaattagaaaaatagaccgggcatagtggctcatgcctgtaatcccagcactttgtgaggccaaggtgggtggattgcttgaggtcaggaattcaagaccagcctggccaacatggtgaaaccccatctctacaaaaaataaaaaaattaactgggcatgtggcgcatgcctacaatcgtgtaatcgtggggaggctgaggcactagaatcgcttgaacccgggaggcggaggttgcagtgacctgacatcataccacttcactcctgcctgggcgacagagcaagactctgtctttaaaaaaaaaaaatgtgtatgtcacatcagaagatgggacttggcatagagaaagtaaggaccatgggatagtgagggaaggccctggagagtgacaggcacacacactaatcactgtctcccacctgccttcctaatcctccgtggtggctcaggacactctgtaaatactcatttgcagagtaacaaagggtggatggggtccagccagagaggctaataactcctgcatccctccagcagcccacacagggcaacctgacctctgctcccaggggccctgggacgctgggctgcccgctctgccctaaggccttccctctgcagcgcatgctgacaaggcacctcaagtgccacagccccgtgcgccgccacctgtgccgctgttgtggcaagggctttcatgacgccttcgatctcaagcgccacatgaggactcacactggtgagcagtggcagggacagggaaaagttgctgggccccaggtggggatggaaggaaatggagagaggtgctgggctgtggagtgtccatggtttgtgtatgtggggtatggagaatcaagacatgatgtctctcggaccccagtgggtgggtgtaaggtggcaccaaaataggggcctgtcacggaatgcagagtgcagacggatgccggttatacgattcaggctccagatcgaaaggcaagggaaggcctccctctccatcccccaggggagggagcatcctggtgagggagagtggagacacaggtgtctggcccatgtctgcactgggtgacggtagcagatggtgggtcatgggcggaagagtctgaagagcttggaataggtaccagaaatgctcaacactggaaagcagggtgggggcgctttagtccagagcccattgccctctctgtccagccctcccctctgcgcccatctgtgcagggatccggcccttccgctgcagtgcttgcgggaaagcgtttacgcagcgctgctccctggaagctcaccttgctaaggtgcatggacagccggccagctacgcttaccgtgagcgccgcgagaagctgcacgtgtgcgaggactgcggcttcaccagctcccggcccgacacctacgcacagcaccgcgccctgcaccgcgcagcctgatacggtgtgccagcgtcctccccacgaggcaaataaacacagaaaactcacgcatggaatctggtgtttattacactcgggggagagaggaggtcactcggtccagcggtggccgcagtgtggggctgtgcacacgtagtaaaggcgcatggcgtcctggcagaaatgatgcatggttaggaaggatttggacccagcagcgccttaccccaaaagaacaggcaagagaacttcaccaataggtaagggcccggcagagttccaagaagcgcagggtcacccacattgatatccccgcccccagaaaggaccaaacaagccccagatacttagaaagccctcgcgccacttacctcggcccgcgcactgtgtgactggaagaacacagcctccttgtggccgcacctgagagggtaggggctcggtcaccggaggcttcacacccttccctcctcccttcgcccagtgaggagacgagcctcactttacctccccagtaccagctgaacgctcacttttggcacgggtggtcctcggtccgcggcaacgtggggtcctgggacacgtcggcgataatctgggtcagttcgctgcagggacgcgggggtgcaaaattacgctcagacccagcctccagagccaacacccccgcccccagctcagggcccgccactcactccacttcgtgcgtgatcttgttgacatagatgcagctgttgtcggcctcctgctggtaatcacagttccggcactacgagagggcgagtgtgggggaaagggggtcacggaaggattccagacaagattgggaggagagggcagggtgatcccggaggatatgacgacaggactctctttggggatgggcaggacatgagagtcaggatcacttgaggtgcagcggagggcgaacagggagtccgatcacagaggcagggggcagggcggggccacgctgggaacaggtggacctgccggggaagaccccggcgctcaccgcgtagagcagaatgcggttctccttgtcttccttggggtacagcatgttgttactgtggggagggggaggtgccaggggttagttctggagccattcctcgcccgccttctaacatcacccgctccctccgcctcaccattcctggcagaagcgaatacccacgaagcccggctcgtaagtcccgtcgggctccatggcgacgcgcagcccgcgcagccctcccagccttccgcgcttgctccgccgcgctacaggtcgcgggaggggccaggcctaggtgcttcgccaaaagagggcggagctgcgcacacgtgctggctccccgccgcctcgggctcggctctctccgcgcagaggtttcatggcttgcttcaatcttttgatatcttagagtaattgcttccaatttttgggcatcgccgcctcagtttacagaatagtatggatctggtgccagagccgggaaaacgatgcgcatcgtaaaccgcaaaacactgagcatccaggacagaagccaaggcgcttggcttggttgaaggccagtgcgcatgcgcgagtttacccttcgcggactgggcgagctcttgccactcctacctccgggcttcagtcttcgccgcctgttctggtcctttcccgggccgctattggaagaaccgtgaactatggaaggcccctctggattggctgggctggcccaagagtaaggagagccctcttcctggcggtggggaagggacggcggcgattggcggacgctcctggcaggagagcgcggattggtcaggcacggagcaggaggcggggctgatagcccagcagcagcagcggcggcggcggctgcggagcgggtgtgaggcggctggaccgcgctgcaggcatccgcagggcgcggcaagatggaggtgacgggggtgtcggcacccacggtgaccgttttcatcagcagctccctcaacaccttccgctccgagaagcgatacagccgcagcctcaccatcgctgagttcaaggtgtggccatgggggcggggtccggaggggcggggcgaagaaattggggggttcccggaagggggaggctgggaggggccggggagtgactgggcgggcccggaggtgatcccaggctgcggaggctggggacccggtcgcggcggggcgggtccggagagaactcgagagtgcagagatgagggccgggtccagcgaaaaatccgacggtccagagggcgggggcaagaggcgaggggctggattgcggccccgtgcgtcctgactggggggtcttttggaggaaaagggacgtggcgatggtcattgatgcaaggggcggggcctccgtggcctccttcttctcaccctgcctcctcctcacagtgtaaactggagttgctggtgggcagccctgcttcctgcatggaactggagctgtatggagttgacgacaagttctacagcaagctggatcaagaggatgcgctcctgggctcctaccctgtagatgacggctgccgcatccacgtgaggactctctatctgggacactcccccaccccacctttcatttggttattcaacagacacttgctgggctttgccctcagtcatacccgagataggtcctgccttcgtggagcctccagtgcagcctgacgagagacagacccatcattagacagggacagcctagagtggtctgggctgggatcaggaaatcccaggggactggagccaccaagaagaggtgcctgactccacctgggagaatcagagagggcttcctggaggaagggatgtctgagctgagggatgaggaaagggtgacttaagagaaagaggtggaaaggagggagcagggtgtacagaggcctagaatgtgaggtaggtcacagtgagcgaccaggctggacagcttgggagaaaccagaacacaggatctctttgtgcatccactcagtacatcctttctgtctttttttgagacagagtctcactctgtcacccaacctggaatggagtgcagtggcactatcgggctcactgcagccttcacctcctgggttcaagtgatccttgtgccccagcctcccgagtagctgggattacaggtgcccacccagctaatttttgtatttttagtagagatgggtttttgccatgttggccaggctggtctggaactcctgacctcaagtgatcagctcaccttggcctactaaagtgctgggattacaggcgtgagccaccaagcccagcccctttctgtccttattccctcccgacctcactcagtctgtagcagccacattgctccttgcacagtccaggtgagctcggcctctggatcctgggcctgaatggttcttttgtcatatgcctgcgtgcctcacccttccttcctgtcttaatttaaagtgtcagtattctagtgaagtcttcaccggcctcagtgttaacgtttacctcattcctttccccttctttgctttattttagatttttgtgtttacaagtaattctcctctgacacactctggatttctctcatctggtttatttactctctgtctccctggattcgagtgccctgagggtggaaattttgatcactataattcactactgtgtccccagtacttggaatagtgcctgggacagggaggatagtccgtgaatcgttttttgttttgttttgttcgagacagagttttgcccttgttccccaggccggaatgcagtggtgtgatctcagctcactgcaacctctgtctcctgggttcaagctattctcctgcctcagcctcccaagtagctgggattacaggtgtgcaccaccacgcctggctaattttgtaattttgtattttaagtagagttggggtttcaccatgttggccaggctggtcttgaactcctgacctcaagtgatctgcccacctcagcctcgcaaagtgctgggattacaggcatgagccaccacgcccagccctgtgaatcattgttgaatgatgaattgaatccataaagtaagaccacaaggataatgtaattatccccattttgcagaagagaaaatttagcttcagggtggagtttatttatttattttttattttttttgagacagagtcttgctctgtctcccaggctggcgtgcagtggcatgatctcggctcactgcaacctccgcctccccggttcaagcgattctcctgcctcagcctcccgagtaggtgggattacagatgcccgccactacaccagggtaatttttgtatttttagtagagacggggtttcaccatgttagtcagactggtctcgaactcctgacctcaggtaatccgcccacctcggcctcccaaagtgctgggattacaggcatgagccaccgcacccggcccagaatctactttcttaaggatgaactgtcagtagcattttggccccagtctacatgactctagagagaactgcttcttttttctctcgttgattaactgttcattccccatctgtgttgtgccaggggtttcattatgactgcatctgagaagttctagtgtatgaggcagatgttggctaaatggccagaggactgaatgtgaagggtcaggggagacaagggttgtgtaggagatcatgaagctgggagaccctatcctggggtacctgatgcatcagtgacgtctgggaggacatcctggaggtggtgctgctggagcagagacgagaagaataaaaagaattggtcgggcatggtggttcacgcctgtaatcccagtgccttgggaggctgaggtggacagatcacttaaggtcaggagttcgagacggtgaaaccccgtctctcctaaaaatacagaaattagctgggcgtggtggcagatgcctgtaatcctagctactcaggaggctgaggcaggaggatcacttgaacccaggagctggaagttgcagtgagctgagatcacaccactgcactccagtttggatgatagagtgagatcctatctttaaaaaaaaaaaaaaaaaaaaggttaactgaagatggggaaggggtgccctaggagtggggcacaacccagcaaacactccaaggtgggagggagcgcggtggggattaagacaggccacttctgtggccaaacactgtggaagctggggaggaccctgacctggctcaggtgttcacaggccccctctggctgtgtgtggggaacaggtggtggaggacaggaagagtagggagaccaggaaggggctgctgtgagagtcctgatgaggggacgaggtctggagctgtgggtcaggcctctgctgggtgcacaggactgagcctttgggccaccctgggcagctgaagctaaggggtgcgggtgttcataggcacctcataggcagtggcatctttgagcaggtttcataacaggcggttcaggtacacacagacctcccaggccactcaaggaaggtgttccagagtggagccactggggaatttttacattttctaaaattctttttctctttataaatatcacccatattcattgtttaaaataacagaacttcaaatttgtgaaaattctcaacagaaattctcagtgacgcttcatccggaggtaaaggccattcctattttgccatgttagcccagtggcttaggccagacacctcagggtgttccttgggcccgctctctccctcacccccacatccactctcatcaaatcctctcggctccacctacaaaaacttccctgaccctggtccagcctccatccttcccccaacctcgccatcccggcagcttcctccctggcctccccgctccccatctcagccagagggagcctgggaccacctgagtcaggccagggccctcctagctcagagccctgccctggtggcacttcgctccagataaaaaccaaagtctaggccaggtgcggtggatcgtgcctgtaatcccacccagtacattgggaggctgaggtgggaagatcacttgaggtcaggagttctagaccagcctgaccagcatggcaaaatgtcgtctctacttaaaaatacaaaaattagccgggtgtggtggtgtgtgcctatagtttcagctgcccgggaggctgaggcaggagaatcacttgaatttgcagtgaggcagaggtttccgtgagctgagatcacaccaccacactccagcctgggtgacagagcgagactccgtcaaaaaaaaaaaaaaaacccaaagtctccagcagtcccttgtgtcttccactctccctctggctcgctccaccccacccgcaccacccactctagagcgtgaaggacatttctacctctggccgtctgcacctgccgttcttgctcatctttccagccttggctgaaacatcccctcttttgggaagcctaccctcccatgctccttaagcctcttccctgtcatatttttctccatagccatcctccagtgtttcataggtacctgttcctttgtttgtggttggccttctccctgcacaatgagcacagcctgagggcagagtgcgtctgtgtttacactgagtccccagcatgaggcccagctgggcccctgggagctcggaaaccaatgaatgaatgaatagtgggggcagaacaggaagagatgctctggggcctgaggttggggccagcttaggagagtcccagaggcccatcgaggagatgcgctgtgcacagggctgtgggcaaggcctgagctctgccggttggactctgtgactttggggcccttggcgatgttgatgccagcaagcggggaacttctggggacagaggcagcctctgggagcttggatgggggtgaggaaggggaggtggccagtgtacgtagctacttctcccttccgctgggctcaggagagaagagaaggctgcagtacaggcgagggagggagatgcgtttttcccagatggagacactgaagtccctgcacccagcacccaggcctccctggccagaccctgatccccacggagcccctcccctcacacaggtcattgaccacagtggcgcccgccttggtgagtatgaggacgtgtcccgggtggagaagtacacgatctcacaagaagcctacgaccagaggcaaggtacgggcaggtgggcgtcgaggggtgcgtgggggccagagggagtatgtgcaggtatgagggcgggcaggttagacagggcccctgcagggaggccagtggtgtagacggggggccgagagcttgggaggatataggggtgaggctgggagtggggacagacggaggcctggggtgggaatgagggccgggaggtgtcaggggtatgggcagtcagacgtggtcgggggagggctgggaaagtggagggagttgaggggtaggtgtgggggctgggtgttgtcagggtcagatgggggcatggggcggtcggacggggtgtggagggcaggacaggtggaatgcgagtggacagggtggcggtcagtgagggcgcctgggacggatcgagtgttgggggagaccgggggcctcagggccggaggagggcggaggaggaaggcggatgatgaaggcagatgtgcgctgaaggggtgagagaccatgggtcctgtagtgaggggtgcaggcggcaccccttccatttacgattgtggagttggggggcctaggagtcctgggagaggctaaggctgtggtgggagacctggggcttgggtgacagccctttgtcacctggaagagagagttcctccgtgaacgtgggcccctcgtgggtggagcgtcatcctgttaggcccggccgacaccccaactgaccccagccccctctgcccacagacacggtccgctctttcctgaagcgcagcaagctcggccggtacaacgaggaggagcgggctcagcaggaggccgaggccgcccagcgcctggccgaggagaaggcccaggccagctccatccccgtgggcagccgctgtgaggtgcgggcggcgggacaatcccctcgccggggcaccgtcatgtatgtaggtgcgtggctcgcgggcccggtcccgggctccagggctccaaggccgggaggaaatgttgggggcacagtggagcctcggagaccacgctctgcctaggggcgcggggttgggggggactcgaaacgatctcagtccctggaggtgacggaaccatctgccgacactgacggcccagagtgtttgtggagggaagtgggaggcgcaggcggagtgatctgtccagcgagggaggaagcagaagccagaggcacgcggcctgtgcgcttcgaagcgtggggcagtgtcagtcgcggtggggaaacgggcggcgtgaccaaggcaggagtgagggaacacagggggctgtgtgagcccagaggaagcacctggaggctgggagcatctgaaggaaaggaggcagcagccaggtgaaaagggaggaagagttcccgccagaaggagtagcgggtgcaggtgagcagagcgcaggaggtccacctggggaaggggagcgggaggagaggggagaagtgtagtcaggggcatgggcagggcggcgtcacagtggagagcagtgtggatttttttaaaaagaacaggctaggcatgatggctcacgcctgtaaactcagcactttgggagaacaaggtgggaggcttgcttgagccccggagttggaggttacagtgagctatgattgtgtcattgcaccctagcctgggcagcagagaaagacccagtctcaaaaaaaaggctgggtgcagtggctcacacctgtaatcccagcactttgggaggctgagacaggaggatcacttgaacccaggaatttgagaccagcctgggcaacataatgagaccctgtctctacaaaaaaaaaaaaaaaaaaatcccacaaaacttttgtcagttgtggtggtgagcacctataggtgccccagctacttgggaggctgaggtgggaggatggcttgagcccgggagttgaggctgcagtgagctatgatcgcaccactgcactgcagcctgggtgacagagggagaccctgtctccaaaaaaaaaaaaaaaaaaagatacacggggtacatatatgtattgttacatgggtgtgttgcctgctagtgggtggggaccgggcttctagtgtacccatgacccaaattgtgaacatcgtacccaacagataatttttcaaccctcaccaccctcctgtttctggcatccccactgtctggtatttccgtctttatgcctgtgtgtacccatcccccagtcgtcttcagccactaatttacgtctgtctctaatttgccgattctggatgtttcataggaataggatcatgcagtctgtggccttttgtaactggcgccttccactgagcagaatgctttcaagtttcatccgtggcatgcctgtgtcagtgccacactgttgccaaatagtcctgcattgagcgcctagaccacagtgtatccagtcaccagttagtggacattagggtcatttccactttttggctattatgaataatgctgctatgaaccttcttcttttttttttttttttttttctaatttgagacagcatctggctattgcccaggctggaatgcagtggcacaatctcggccatttcagccttaacctcttgggctcaagccatcctcccacctcggcctcctgagtagctgggaatacaggtactcatcaccacccccggctaaagttttgtggttttttttgtaggatgggatttcgccatgtggcccaggctggtctcaaactcttcccgctcaagtgatcgtcctgcttcagcctcccaaagtgctgggattacaggtgtgagccaccatgctaggcctgaacattcttttataaatttctgtgtggctgggcatggtggctcatgcctgtaattccagcactttgggaggccaaggtgggcagatcacctgagatcaggaattttgagaccagcctggccaacatggtgaaaccccatctctactaaaaattcaaaaattaactgggcgtggtggcgggtgcctgtgatcgcagctacccggaaggctgaggcaggagaatcgcttgagcctgggaggcggaggttgcagtgagccaagatcacaccactgcactccagcctgggcaaccatgcaagactccatctcaaaaaataaaaaatacatttttatgtggacatttgttttcatttctctgtgcctaggagtggaatccctgggccacatggtaacactgtgcttgacttttttgaggacctgccacactgcttcccacagccgctgcagcagttttcattcccgccagcagtgcagaagggtcccattttgtcctcatcctcaccagcactttagtctgtcttttgcttacagtcatccactgggtgtgaagtggaacatcatcatggttttgatttgcacttctttggcagctaatgatgttgagcatctttgcatggccatttgtgtatcttctttggagaaatgtctattcagatcctttgccttttgttttttgacacacagtctcactccgtcacccaggctggagtgcagtggtgctctcagctcactgcatcctctgcctcccgggttcaagcaattctcatgcctcagcctcccgagtagctgggattataggtgagcgctacaacacctggctaatttctgtatttttagtagagacagggttttgccatgttggccaggctggtctcaaactcctggcctcaagtgatccacctgagctggtggatctcccaaagtgctaggattacaaacatgagccactgcgcccatcggtatgtcggggtttggttttgttttttttcttttgagacgtaatctcgctttgtgcccaggctggaatacagtggcatgatctcagctcgctcgttccaacctccgcctcccgggttcaaacggttctcctgcctcagcctcccgagtagctggaactacaggcgcccgccaccacacccggctaattttttgtatttttagtagagacggggcttcaccgtgttagccaggatggtctcgatctcctgacctcgtgatccaccctcctcagcctactaaagtgctgggattacaggcgtgagccaccgcacccggccagtatgtcatcttttgagaagtgtgtgttcatgtcctttggccatgatcgtggctcactgcagcctcaacttcctgttgcccactttgtaatgggattttttttttgcaaagtgggtgttctttgagttccttgtatattcttctgctcagtttttcattgggatgctgtcttttgtcgctgagttgtgtattagtttgctaacaaagtaccactcactgagcaacttaaagttatttctcacagtaatggaggctagaagttcaagatcaagctgtcagcaggttggatttattctgaagcctctctctctggcaaggcagtagtgccatcccccttaggtttttacaaagccctcactggctggtgtcttcacccagtgaatgggggacaggggtggaagcagggacaccagtgaagtggctaccatattagtcccggcaggagctggaggtggtcctagtggtagcaatagaggtagcaagaaatggttttcaccaagacaggcttctactcaatgggtaggcatggatccagggtgatcctgaaatttcatggggatttcttctatgtccagaagcttcacagggatttctcttctgttggcaggtctcacagatttcaagcctggctactggattggtgtccgctatgatgagccactggggaaaaatgatggcaggtaacaagaattcccactcaggtgtctgtgtgtgcatttgtgtgtaagtccatgcgtgctgcttgctgagctgcccatgccagcttctagagtggagccatgtgagggtcctctgaccacacccacccctatcctttcctgcagtgtgaatgggaaacgctacttcgaatgccaggccaagtatggcgcctttgtcaagccagcagtcgtgacggtgggggacttcccggaggaggactacgggttggacgagatatgacacctaaggaattcccctgcttcagctcctagctcagccactgactgcccctcctgtgtgtgcccatggcccttttctcctgaccccattttaattttattcattttttcctttgccattgatttttgagactcatgcattaaattcactagaaacccagaaagtatttagaggacttcatgatttggggacccactgggtaaatagtggcccttcggtatcaggggccagcctctgtctcctcatatcttgctgttcccccatcttctcatcattcccacctcatctgctgtagctaccaggaagaaagggaagggaagggaggggatatcctttgcctttaaaaatgatgtacagccagctgggcacggtggctcacgcctgtaatcccacactttgggaggccagggcgggtggatcacgaggtcaggagatcgagaccatcctggctaacacggtgaaaccctttctctactaaaaatacaaaaaaattagccgggcatggtggtgggtgctgtagtcccagctgctggggaggctgaggcaggagaatggcgagaacctgggaggcggagcttgcagtgagccaagatcatgccactgcactccagcctgggcgacagagcgagactgtctcaaaaaaaaagatgtacaactctggctggatgtggtggctcacacctataatcccagcactttgggaggccgaggcaggcggatcatgaggtcaggagatcgagaccatcctggctaacatggtgaaaccccatctctacaaaaaataaaaataaaaaaattagccaagcatggtggcgggcgcctgtagtcccagctactcaggaggctgaggcaggagaatggcgtgaacccgggaggcagagcttgcagtgagctgagatcacgccactgtactccagcctgggcaacagagcgagactccgtctcaaaaaaaaaaaaaaaaaaaaaaaaaaaagatgtacaactcagccaggcacagtggctcatgcctgtaatcccagcactttgggaggccgagctggcaggtcgcttaagcccaggagtttgagatcagcctggacaacatggtaaaacttcatctctacaaaaatgcaaaaaatgagtcaggtatggtggcgcatgcctgtagccccagctacttgggaggctgaggtgggagaatcacttaagcccagaaggtcaaggctacagcgagttatggcaccactgcattccagcctggatgacagagcaagaccctgtctcaaaaccaaaaaaaaagaaaagaggccaagcacggtggcccacgcctgtaatcccagcattttgggaggccgaggcgggagatcgagatcatcctggccaacatggtgaaaccctgactctactaaaaatacaaaaattagctgggtgtggtggcgcgtgcctgtaatcccagctactcaggaggctgaggcaggagaatggcttgaacccaggaggtggagattgcagtgagctgagatcgtgccacttcactccagcctggggacaagagtgagactccgtctcaaaaaaaagaaaaaaagccaggcatggtggcttatgcccataatcccagcactccgggaggccgaggagggcagaccacttgagttcaggagttcaagaccagcctgggcaacatggcaaaaaccctgtctctacaaaaaatacaacaacaacaaaaattagccgggtgtggtggcacgcacctgtagtcccagctacttggaaggctaggtggtaggatcacttgagccttgggaggtagaagctgcagtgagctgtgttcacaccactgcactccagcctgggtgacacagcgagactccatgccgtgacaccagcacgtggcgtgtcacattattaaggattatacagccaacagttactgggctggtttcctttaatcctcacagcaggccctgtccgcaagtctttcaccgtttcccgtcaacactccacctttcctgcccaaagtttggggttgggagggaattcccaggggttcccaggacttgggctcgcctcccagatcccgcaacctttgcgtgcctagcctcggcaatgaccgcccatctgccacgagggggcggcagcgcaccgttcagacgctgcgcccctggtgcattatgggtcgcgtagtctcaaaggtggcataagcatcctggaacgcaaacggcatttcccagaaaactacgcgacaatctgagcctggtcttgcccagagctggaagctgaggtctcgcccctgccggcgttgcgggggattgtgggatgtaggcatttggctccgcgctccgcgaagggcggtgcagcgcaggcgcgggcatccggtacagacagccgagcttaatctgaggcggggaaccagcgtcccgggggaggcgccgaagctgactttctggccgcagtggaagtgaggcgagcgagctcccttagtggctggagccggctgggcctccttcctgtcctcctgctttcctgcatctctacttgtccctttccccgggctcctggtccgctcccaagcctgttcaagcacgaggcgtttccatctaaaaaaagaaaagaaatctcttttgccgggcgagatgtcagagccccgggagcgaaagtgttggtaatgttagacagaatgagttcctcttcaaaaatctaacttccttgtcctttgctctatgaactgtccttcctgcagaaactgcccttaccggggaaactgcccctccccgccgctgcaacccataccccgcctctattagaaataggcaatcggaatcagcttagattgtgaggtccaaccctagccaacgggggttaaaaacccctgctctcctttattaggtgtgcttttggtacaggtctgggcagcacgcttctgcagaagtaaactttgccttgctaagaaacttttctccgagtgctggtctctctctgtggcaccaagaacttatttctaacagtaagaagaatttactgaggacagcgtaggcttgaaaaagaaaagttttactagaaagaatgctgccgggcactcacgcctgtaatcccagcactttgggaggccgaggcaggtggattgcctgagctcaggagttcgagaccaacctgggcaatacagtgaaaccccatctctactaaaatacaaaaaactaactgggcatgccagcatgtgcctgtagtcccagctacttgggaggctgaggcaggagaattgcttgaacccaggaggtggaggttgcagtgagctgacatcatgccactgcattccagcttgggtgacagaatgagactccatctcaaaaaaaaaaaaaaaaaaaaaaaatgaaggaaagaatgctgcaggccaggcagggtggctcacacctgtaatcccagcactttgggaggccgaggcaggcgaatcacctgaggttgggagttcaagaccagcctgaccaacatggagaaactactaaaaatacaaaattaggcgggcatggtggcccatacctataatcccagctacttgggaggctgagataggagaatcgcttgaacccaggaggcggaggttgtggcaagccaagatcacaccattgcactccagcctgggcaacaaaagcgaaactccatttcaaaaaaaaagagctgatttttttgtttgttttttagacagcgtcttgctctgttatccagcctgtgtgtgatcccggcggtgtgatctgagctcactgtagcctcaacttcccgggctcaagtgctcctcccacctcagtaggccccatgaatagctgagactacaggcacatgccaccacacccagctaatttctgtattatttgtagaggtggggtttcgccatgttgctcaggctggagtgcagtggcacaatctcggctcactgcagcctcaggctcctgggctcaagcaatcctcccacctcagtctcccaaagtgctgggattccaggtgtgagccactgcgcacggccaagaataaagattttaataaagtaatgtgaaattaacatgaaaagccaataaggaaactgggcaaatatttgaaaagacaatacataaaagaaacaccaatagccaaaaaaccatgaaagccaagttcacccccattcatatttgaagaatgttacataaaatattgagacaccaccttttgcctgtcaaatcaggaaagatgtttatttttattttttatttttgagacagggtctctctgtcatccaggctggagtatggggcacaatttcgtctcattgcaacctcaaactcctgggctccagcgatcctcccaccccagcctcccaagtagctaggagcacgggcacaccactatgcctggctaattttttcaaaacacttttttgtagagatggagtcttgctatgttgcccaaactggtctcaaactcctgagctcaagtgattctcccacttcagcctcccaaagtgctgggattataggcataagccgccatgccacaaaattttacaagaaaatttcagccagcatttgacaagattccaggggacatgaatgaaatacctaaagataaaagagttccttgaggccagttaaggtggctcatgcctgtaatcccaccactttgggaggccaaggcagtggatcacaaggtcaggagttcaagaccagcctggccaatatagtgaaaccctgttttactaaaaatacaaaaattagcctggcatagtggcgggcacctgtaatcccagctactcaggaggctgaggcaggagaatcgcttgaacttgggaggtagatgttgcagtgagctgagatcacagcaatgcactccagcctacagagcgagagacccctctcaaaaaaaaaaaaaaaaaaaaaggagttccttgacaaaagaaatgtggaatttgctgccttgaactaagttaaattagctgctttgttgcaggaattttcattaatatgctagtccatgataacctgtataaaaggatcctcttgggcattactttctgggttttttgtttgttttcagaaacagggtcttgctctgtcatccaggctggagtgtcatggtgtgatcatatatcatatctcactgcagcctcgaatttctgggctcaagctatcttccagcctgaacctcctgagtagctaggactgcaggtgtgtgccaccatgcccagctaattaaaaaacttatttttgtacagatgaggtctcattatgttgcctagagtggtctctattcctgggctcaagaaatcctcccctctcagcctcccaaagcactgagataacgtgtgtgccactgtgcttggcctgaattttttattttaaaatacattttgtgagctgtgcttagtaatgcacacctgtagtcctagctacttaagaggctgaggcaggggcatcgcttgagcctaggagtttgagaccagcctggacaacacaggaaaaccccatctttacaaataatcaaaaaattagccattactcgggaggctgaggcatgagaatcgcttgagcctgagaagttgagctgcagtgagctgtgattgcaccactgcactccagtctggctgggtgacagagcatgaccctgtctcaaaaaaaaaaaaaaaaggaaaaaaaattattcaacaacagttgttaaagcacaggaagggctgggcacggtggcttccgcctgtaatcccagcactttgggtggctgaggcaggcagatcacatgaggtcaggagttcaagaccagcctggccaaaatggtgaaaccccgtctctactaaaaacacaaaaattagctgggcgtggtggcccacacctgtaatcctagccactggagaggctgaagcatgagaatctcttgaactcgagaggcagaggttgcagtgagccaagatcacgccactgcactccagcctaggcaacagaacgagactccatctcaaaaaattaaaaaaattaaaaatagaataaggcacaggaaaggaaggctttattcagagccattacgatagagagaggggccacagtggcagggccttgcagtgagggagacaggttgggctcaactccaaatactgcatggggaagtgggaattcatagcccaggatcgggtggggcgcagtggattgaaagttactaagaggaaacatcaggggtaaggggggattctggctaaaccagcctaacaggattcttgctgaagacaggcccaggtgatcagacatcacataggggctggtggaggatgaggaacctaatcagatgttgaagatgggagagggttctcgataaactgacttagcagggttctttgctaaaactggatttgacaagggagtacacagatgagcctagcagaagattcagagacttgactagtttggccatgcaagaatttcttttttgttttgtttttttctgtttgttttgttcggctcactgcaacctccacctcctgggttcaagcgattctcttccctcagcctgtggagtagctggaattacaggtgcctgccaccacacccggtttgtgtgtgggtgtgtgtatttttagtagagatggggttttgccatgttggccaggctggtctcgaactcctgacctcaagagatccacccacctcagcctcccaaagtgctgggattacaggtgttgagccacctcgcccggcccaagcaaataatttttatcagggaattgactccaaagaaaaacaataggagaggaggtcctgcagggtcacagcccatacaagagtctggccgcaaggaagcctggtaagaggagagggaacagagcggtgctgacctgctgaagggaaggcagaggtcggacaggtacccggattagtcatcacataacaacttggcatcagccatgctctgccatctactgtgtggcctcaggcaagtgactcactctctctgaacatccacttcctctcatgttggtttctttctcagaggcttgtgagaggccttggcaagccatggccataaagcaatcactggctgggcatggtccctcacgcctgtaatcccagcacttttggggcaccgaggtgggaggatcacttgaggccaggagttcaagaccagcctgggcaacatagtgagacctggtccttacaaaaaataaaaaaatgattcaggtgtggtggtgcacacctgtagtcccagctactctggaggctaaggtgggaggatcccttgagcctaggattttgaggttgcagtgagctataattgtgccactgccctccagcctgggtaatgaagtgagaccctgtctcacttttttttttttttttttttgacatggagtcttgctctgtcaccaggctggagtccagtggtacgatcttggctcactgcaacctctgcctcccgggttcaagtgattctcgtgccacagtctcccgagtagctgggattacaggcactcaccaccacacccagctaatttttgtatttttagtagagacggggtttcaccatattggccaggctggtctccatctcctgacctagtgatccacccgccttggcctcccaaagtgctggaattacaggtgtgagccactgcacctggccaagaaaaaaatttcttgcttatacaaagtcagctgtgggtctgggtgactatcaagagcagaagtgctcgatgccagggctcggccctcttccttcatgtggcacctccaggtttgctcagctcctagtgtgacccgggcaggagaaaacagagcatggagcattctgcactgccttcccctgcgcccgccataaacacaaggtcttgctctgtccactgggctggagtgcaatggttgcactggtttttaaatgcttctacaaggagcatttaaagtgttctacatccaacacttctacttacattttattggccaaagtaagtcagataactcctgagttcagcagatcctgggagatggcggagggcattagtaatgcttgccctactgtctcactgctggtgctgaaaatccaatgagaaaatacacacaaaacatattcattcattcaacaaatgtttactgggcacctatgatgtgccaaccactgttctaggaactggatacatacctctgagtgagtacatagcagtgaacaagacatatagaaatcccagtccagccgggtgcagtggctcacacatgtaatcccagcactttgggaggccaagcggatggatcacctgaggtcaggagttcaagacaagcttggccaagatggtgaaacaccatctctactaaaaatacaaaaattagctgggcgtggtggcgggtgcctgtaatcccagctactcgagaggctgaggcagagaattgcttgaacccaggaggtggaggttgcagtgagccgagatcgagccactgcactccagcctaggcaacagagtgagactccgtctcaaaaaaaaaaaaaaatagaagtcccagtccgtggcaagctcacatactagcggaggagacagaaatctggatcaatatgtaaagtacacagggctgggcgtggtggctcatgcctgtaatctaagcactttgggaggctgaggtgggtggatcacctgaggtcaggagttcgagaccagcctggccaacatgatgaaaccttgtctctactaaaaatacaaacaaattagccgggtgtggtggtggacacctgtcatcccagctacttgggaggctgaggcaggagaatcgcttgaacccaggaggtggaggttgtagtgagctaagaccgtgccattgccctccagcctgagcaacaaaaatgaaactccatctcaataataataataataataataaaacaaaaaaaaaagtacacagtacgtgagcgggtgataaaagacaggaccttcccgtgatcactagatgtgtagacatgaaagatctgcttcccagacctggggctggagaaggtcttggtaagggagtggtggcctcatgtcttcatgtctgccctgagagaggctgtttggatgttgctgtgcttgcagggcctccatgctgagttttgtctctgttcagctgggaacatgcaggtgaccttgccaggcaggcatcttctcactttctccagggcgaagagatgagggcagggaggtgacaggacagatcactaggggtggctgtcatgagaactttaggctggagtgcagtggtgcaatcaaggctcactgcagcctctacctcctgggctcaagtgatcctcccacctcagcctcccgagtagctgggactacaggcacatgccaccatgcctggctagtttttggtattttttgtagagatggggtcttgccatgttgcccaggctggtctcaaactcctaggttcaagcgatcctcctgcctcagtctcccaaagtgctgggattccaggcatgagccaccgcacctggccctgttgtgagaacttctgactctttcctggagtggggtgcagccagggcagggctctgagcctacagggccctgacctgactcaggtggtctcaggcttcctctggctccacaagaggagcagacagcagggagcagacagaagggagcaggctgtggggtgtccaggtgggaaaggatggaggctgtggcagggtggggacagtggaggggaagagtttagtttctgtaggtggagccaataatatctgctgacaggttggagtgggtgtgaaggagagaggtgaaggaccaccccggagtgtttggcctcagtcactggaaggacagagctgccactgacctaggtggggaaggtagtgagggagcaggttctggaggaaggtcagaagctcagtttaggatatgtaaagcttaaaatgcctctaagggccaggtgcattggctcacacctgcaatcccagcactttgggaggctgaggcgggtggatcacgaggtcaagggattgggaccatcctggccaacatggtgaaaccccgtctctactaaaaaatacaaaaattagctgggcatggttgcgcatgcctgtagtcccagctactcgggaggctgaggcaggagaactgcttgaacctcagaggtggaggatgcagtgagccgagatcgcgccactgcactccagcctggtgacagagcaagactccgtctcaaaaaaagaaaagaaaaagaaaaaggaaaaaaaaagcctctgagatcttccatcctttcccatggaaatggtgaatatgatgcaggatgtaggagcctggagttcgcaggaggtgtctgggctggagatagaaatttgggggttagggttagggccaggtgcagtggctcacgcctgtaatcctagcactttgggaggctgaggtgggaggatcacttgagctcagagttcaagaccagcctgggcaacacagtaagacctcatctctacaaataattaaaaaagaaaaaagataaaggaaatttggatgtttgccgggcgtggtagcttgtgcctgtagcagtagctattcaggaggttgaggcaggaggaggattccttgaggccgggagttacaggctgcagtgagctacatcacatcactgcattccagtctgggtgacagaacccctgtctctaagaacaacacaaaaaactgggcgttggccgggtgctgtggctcatgcctgtaatcccagcactttgggaggccaaggcgggtggatcacaaggtcaggagatcgagaacatcctggttaacacggtgaaaccccgtctctactaaaaatacaaaaaattagccagcgtggtggcaggtgcctgtagtcccagctactctggaggctgaggcaggagaatggcgtgaacccgggaggcggagcttgcagcgagcagagatcgcgccactgcactccagcctgggcgacagagtgagactccatctcgaaagcaaaacaaaacaaaaaactgggcgttgatagcctagagacaggatttaagctgtgcatgtaggggaggcaccccatggcatgagtggtacagagaggaggatagagacctaacacctggggctgccgggaataaggggttgggggccagaactagatgacaatatggttacgattggcagtgagtgccatgagaaagtacaagtcattttgaaagcatataactggaagcctcacctagtctcaggttgggtggagacagggaggtctttctggaagagatgactcctgaggtgacacctgcagcctgagtagctacacaatcaggccagaaaaaaaaaggcagcaggggagttcctggccgagggcatgagggctggcagcaagtgagcctcgggagagggcagagagctggagcagtcagtctggcagggaggggtgtggtgagaagggaatctggattagtcatcaccaaaagatctgtgccaagcccgggttcagatctggttctgccaccctccgtgaccctgcctttcagaatctccattctctctcctgccctgcagacaaggcttgtgtagcagttaccttggcctggccccagcaaggcctcaggaaacatcagctgcaactagttttgtctgttgtgatgttgttatttgacctattatattaattatattattaacgcataagggtagtggttaaggatacaggctagggagagtgactgcttgggtttaacctcagagtcggtttacttatctgtaaaatggggataataaatagcatctatgtcacagggctgttaggagaacaagggaactgatggacgtcaagcacttggaggagtggttgatggttacttgtttttgtatcttttttttttttttgagacagtttcgctcttgttgcccaagctagagtgcaatggcacgatctcgagtcactgcaacctctgcctcccgggttcaagcgattctcctgcctcagcctcccgagtagctgggattacaggcacacgccaccacgcctggctgattttttgtatttttagtagaaacaggatttcaccatgttagtcagggtggtcccaaactcctgacctcagtgatctgcccacctcggcctcccaaagtgctgggattacaggcgtgagccaccacacctggcctgtttttgtactatttaaggaagactaagagtctaccagctgaggaatacagctggcctcgaggctgagggaacagcatgagcacagacacagagctaatgggggcatttacaaagcatttatcaccaatttatttatttatttattggagacggagtttcactcttgttgcccaggctggagtgcaatggtgcaatcttggctcactgaaacctctgcctactgggttcaagcgattctcctgtctcagcctcccgagtagctgggattacaggtatgcaccaccacatccggctaattttgtattttttagtagagacagggtttctccatgttagtcagactggtctcgaactcccgacctcaggtgatctgcccgcctcagcatcccaaagtcctggggttattggcatgagccactgtgcccagtatttatttgagacagagtctcgctctgtcacccagattgtagtgcagtggcatgatctcggctcactgcaacccccgcctcctgggctctggtgatccccccacctcagtctctagagtagctgggactaggcgcatgccaccacattcagctaatttctgtattatttgtagagacaaggtctcactatattgcccaggctggagtcaaactcctgggctcaagagatcctcctgcctcagcctcccaaaatgcagggaatacaggcatgaaccacttcacccagccaccacttaagttttttttttaataatcagtattgctgcagatatcatttaattttgatagggggcctagtggtatggagcaacccatgttcccattttacagatgagaaaatcgctgctcaggaatatcaagccactcttttggggttgtgcagttattacagggcacagccaggattcaactcaagcctagccagcctgcagggtaggggataagagccagccagcctgcctgggggccagatttagctccccccgatgagtcctgaaaaagtactggactcccgtggctcatgcctgtaatcctagcactttggcaggccgaggcaggtggatcacctaagatcaggagtttgagaccagcctggccaacatggtgaaaccccgtctctactaaaaatacaaaaattagctgggtgtggtggtgcatgcctgtaatcccagctactcgggaggctgaggcaggagaatcgcttgaacctgggaggcagagactgcagtgagctgagatggcgccactgcaccccagcctgggcaacagagcaagacgctgtctcaaaacaaaaaaaaaaaaaaagaaaagaaaagaaaagaaaccaggctatgtaaaaatattattgtaaaaaattaaattaaatcaaaaaaaggccggtagcccatacctgtaatcccagtacctcacagtactttgggaggctgaggcaggaggacggcttgaggcccggagttcaagagcagcctgggcaacatagcgagacctccgtctctattatgtaaaaacaataatattttttaagtaaataaagaaaccaggccgtggccaaaggaatcttcctgtgtctggggccttctttagaggctagcatactgaggacactctttgggccagtccaggaaggaatgattctggtggcccctgactggggcgggggcgtggtaaggttcgcctgggaggcggcgcaggcgctgcctgcggtttgactgccatccgggctgctgcaggcactgggaaaggcaatccagcctcaatcctcgccacagacacgggcgactgtcccccagcgtgtgagtcaaaccatactccaggcctccaggaggtgtttgtcgcgacaacacctgcagagggcccgtgcggagtcccttagtgagcggaccgaaaaccgccaccctggaaggatattggcatgccctagggtgaaaattcacactacgacactcggggggtgggtcccctccgagttctcgtccgcgggtgcctccacccagacctgaggggtgtcgggaagacccccgcctaccgagtcagggcgggattaagacctccggcgctggaaacgcgtagggcggggcccagacctggatccagctagccgggcggtgtggggtgcgcatgcgcaatgtccgcttcggctctaggaccgcgcgggcgacagcagggccgcggtgcagtgtccgacccgagagttgcggcctgagtcaccggccccgccctccggagccggacgctgcgggaggcccgggagcggcagtggaaccgactcccagaactccggacgtgtgcggcggtaagcgcccggcccgtaccccctccgcaccccgcaactccgactttggcggcccccagacccggcgaaaccgtgaagtctcggcctcaggagccccccagatccatggtctcagattcgaaccctcagacctgttcgatctccttttatgccgtcccggggacccttctccaccctctgtctcatgatccaaaatacaggcccataggtttcagagataccctgtgaattcttccttggggtgtcctgaaccgcgatcgtagatctgtgcccccagttccagcggggaaccccattgtccgggaacccagagctcacagccacgatcttagacccgagcccacagagccagaggtgacactggaatcctgccgctgggaatacctaaattctcaagcccacatttgggatttcctaaaccccgccctggggccctttaggccgtggatgtttgctccgcgcccatgacctgccaaggacctctacattcaggctgggctctggatctcacattctagcgcccagacatgtcgggaacgccttacgccaacttggggtccccaccaagagaacccccaccagatctgcaccctccccttcacgcgtgcacccagtccaggctccctcaagccccacgggtgccttttagacctgaggaggttgcaaacctgatcccccatacctgccccacccatccgcggacaacccgccctcgcaaactcagacccccacccggaggcttcagattcctcccaggtccagctgccggaaatgcgtgtttgaagggagggtgtgggctcaggggcgaagcacccactggtccccttttttccccccagcagtgagtcgcagccatgttcctggttaactcgttcttgaagggcggcggcggcggcggcgggggaggcgggggcctgggtgggggcctgggaaatgtgcttggaggcctgatcagcggggccgggggcggcggcggcggcggcggcggcggcggcggtggtggaggcggcggtggcggtggaacggccatgcgcatcctaggcggagtcatcagcgccatcaggtaaggcggagactatcagaggggcggggcctgggaatgggaggagcctcagtgaggcgtggtctgggaggggcgtggtctaaaaatagaataggattaacctggaggctaacctgggtacatgaattaggccggggaggcctggtttgagagttctgctgtaagggggtggaccccagtgaggcggatatcagtcattgggggcggtgcttgatatgggagtagtctgattgtgtgggaccaggacaatgtggtcctgaggggactgatgtggagttttggcgggtggggcttatgggtctgggctcagcctgcattggctaacctggagatgaacgttaaaggtgcggagccaatgcgtctgagtgacattttacggaaggggcttgacttatgagtgtggtcagaggttttaggtgggttaatgaggaggtgagcccaggaggaagcaagacctaatggggtagggtaaatggcccagaatgggctgggcttgctgggaactggctggattaatggagaaaaatgccctggtagggatagggcaggttggcttaattagccacggccacttagcagtgatcccttgaaggggcggggaccaatggctggggtaggatgttgggaagacgggcatttaggaagcgggccatggagtagggtcttgggcagatggcacctgaggaggataaggccttgggaagctggggcagagcctctatgaagtgagccctccaaggggcggggtcttttgattctacgtgggattttttaggtttagggtggccaagatgactgaaatctgccactgggtaggtgtgcctggcaggaggggagcctcccaggggaccggtctctgggtttcctcgagggtggggttggcctgaggaagggagaagaggggcacgaccagggcagtgtggattgggacagatgaggacaagaacaaatgaaaggcacagcaaccaagtaaggaagataacggctggggtctggagcgttggggctgatggttctgtagtgctgcccgttggaggccccgcccctggcactaacccctcccccttatctcttcgcagcgaggcggctgcgcagtacaacccggagcccccggtaagccccctctgcaaccagacccccttctcctgccaaggcctcttcgaggtcccatccctgttcctgtagagaagccccaccttcctccccttcttgtgaaattcctctgccagttcctcccatgccgtgtctgcagcttcgccatgggtcttagccatgccccacatacgtgcaccccattcactaccacccctcattcttttcctcatcaagctgcccagcccactctgacttccccacccagggtacctgggtttggggagccgtcctggccgggttcccctccccctgctctgagctctcctccctttgcagcccccacgcacacattactccaacattgaggccaacgagagtgaggaggtccggcagttccggagactctttgcccagctggctggagatgtaagtaacctggggtccctggccccgtcctaaccgttccatcccttcccttgtggctgcccttgcacacacacccttgaccatgacaatcccagtgttcccattctccatgacattctcagacccctttcagtcacccctgacctgcccctaacttccgcccgcaggacatggaggtcagcgccacagaactcatgaacattctcaataaggttgtgacacgacgtaagtgaccggggttaaggaatagggtagattcagaggcagaggggtcagagaggatttgacctctggcctctgactttcaacctgttacccacagaccctgatctgaagactgatggttttggcattgacacatgtcgcagcatggtggccgtgatggatgtatccttgggggcagtgtgggagaggccctgggtggacagagagttttttgagagtatgtttgggaagccaacatgtagctttcatatccacagatgtggaaatgcattcatcagaacacagtcacctgcagacatgtggcggtaaatcataacaatgccagctgtcacagctggcactttaattatataaagtgaccgaaccgtcataaccaccctgttggacaggcacaattattatattccattttacagaagaggaaactgaggctcagtttcctgaaagaagcagtcatttgtctcaagttatagataaaggtcaggcatggtggctcatgcctgtaatcccaacactttgggaggctaaggtgggcagatcacctgaggtcaggagtttgagaccagcctggccaacatggtgaaaccccatctctattaaaaatacaaaaattggccaggcacggtggctcacacctgtaatcccagcactttgggaggccgaggcgggcggatcacgagatcaggagattgagaccatcctggctaacacagtgaaaccctgtctctaccaaaaaaaaaaaaaaaattagccgggcgtagtggcgggcgcctgtagtcccagctattcgggaggctgaagcaggagaatggcgtgaacccgagaggaggagcttgcagtgagccgagatcgcgccactgcactccagcctgggcgacagagccagactctgtctcaaaaaataaaataaaaataaaaataaaaataggccgggcgccgtggctcacgcctgtaatcccagcactttgggaggccgaggcgggcggatcacgaggtcaggagatcgagaccatcctggctaacacggtgaaaccctgtctctactaaaaatacaaaaaaattagccgggtgcagtggtgagcgcctgtagtcccagctactcgggaggctgaggcaggagaatggcgtgaacctgggaggcggagctttgcagtgagccgagatcgcgccactgcactccagcctaggcgacagagagagactccgtctcaaaaaaaaaaaaaaagaaaaaaaaagaaaaataacaataacaaaaattagctgggcgtggtggtgcacgcctgtagtcccagctactcgggagtcccagctactcaagcaggagaattgcttgaacccgggaggcggaggttgcagtgagcagaggtttcgtcactgcactccagtctgtggactcaggtcttttgggcttgagaacccacgtttataacagccacatgcgcatatacacacacacacacctaagagcacacccacatacgtgaaggtgtatgaggcagtgtgcacagggacacacgtgttatctgtacatgggccagccattagctgatcttggatacatgcatatttttatttatttttgttttaaaaaatattttatagagaaaagctttcactatattgacctggcaagtctcaaactccagaccttaagcaatccttccgccttggcctcccaaagtgttgggattacaagcttgagacactgcgcctggcctcatgcacatttaacacatagggcaaacagacacatacataatatacatgtcatgtaatcacagacatattgcatagagcaaagcaatcccaactctacctcttaaccaggttattgaaccgctctgtgcctcagtttctctctctgtaaaatgggtgagtgataatggtgataccgaatcggaactacatccaaaaggtttagcacagtgtatagcgcatagtatgtggtctgtacacattagctcttaactatgatcttgggtagagttttcagctttgaatgttttcttctctggaaatagtcctggtagaactggtgtcccaaggatttagtgagaaagtgatgttcctgagtggacatcaggtggatcctgagttcaagcgatccacctgccttggcttcccaaagtgctgggattacaggcatgaaccaccatgcctggtcacacacttgtttttcacatatcctaacatttttatgaaattgagttactgtcaagaattttcttttctttctctttttttttttttttttttgagacagagtctcactctgtttcccaggctgaagtgcggtggtgccatcttggctcactgctaactccacctcctaggttcaagcagttctcctccctcagcctcctgaatagctgggattacaggtgtgcgctactacagctggccaatttttgtatttttagtagagacgggatttcatcatgttggccaggctggtctcgaactcctgacctcaagtgaaccgcctgcttcggcctcccaaagtgctggattgcaggcgggagccaccgtgcgtggcctattaagaattttctgaatgagcaattaacaactcttcaggcaaggaatttgtactttagagtagttgaatataattcctcatggttatgtttaaagagaatccctatttagaaatgtaagtgacaatatgtatggataaaatgaaaaataaaaccgcacaccaggtgatatgactaggaccaagcgggagctggagtttcagccctggctgccctgcttgctgtatcaccatcgtgtccacagtgcatgtgatgcatgcatctgggtgtagctgtcactcttcttaacaccctcccaccagagcgacaccacaggcaagctgggctttgaggaattcaagtacttgtggaacaacatcaaaaggtggcaggtgtgtagaaacctctgaaatccctggcacccagacccccaagccatggagacactatgccccacaatgctcacttggacccaatgtctctgtcctcacaggccatatacaaacagttcgacactgaccgatcagggaccatttgcagtagtgaactcccaggtgcctttgaggcagcaggtatggctggcagggacatgctggggctgggagtgggatgggtgagaaaacctctactcagctggtctgggcctgactcctgggcatgggagtgggttgggccatgtggcccccgcacctgaaggactacatccatcttagggttccacctgaatgagcatctctataacatgatcatccgacgctactcagatgaaagtgggaacatggattttgacaacttcatcagctgcttggtcaggctggacgccatgttccgtgagtgacaacccagctgtcttcctgggtggggattcctatgacctctatggaccaaggtctcctctaagcctgactttgaggtgggcgatgctaggggcacagtggtgattgaatcagttccagtttctgccctcatggagctcacagtctggtggaggagacacaagtccccagacagtgacagttcagactggtgatggctgggagaggggaagctcagggcagagtgatgggttgtgatgggggcagcacaggccgagggtctagggctctggtgaggggaagagtgagcagagcgtgctcagattgtgcttggggaagcctagagggcaaatccaatccaggaggaacctgatgcagcccaaggggtcagggagggctcactggagagggaacattgagacctgaggggatgaggagagaacttagtgagaaggtagggaatactgttgcaggctgagggaacagcctgtgcaaaggcctagaagggaaagaagatggggcttctgatgctttttgttagatttctttctttctatttttttgagacagagtctgctgctcttgttgcccaggctggagtgcagtggcatgatcatggctgactgcagcctcaactcctaggctccagcagtcctcctgcctcagcttaccgaatacctgggagtacaggcacacaccgccatgcctggctaatttttaaaattttttgtagagacagggtcttgctatgttgcccaggctggtcttgaactcctgggctccagcaatcctcctacctcagcctcccaaagctttggtgttacaggcatgagccattgcatgtggccttctgagtgttagtgtactgaatgctgaagacatggctgggaagtggggattactgtccttattttgtgaaggaggaacttaggattcaaggaggcaaattttcatgctcatagtcacccagctaggaagttgtaaagccagaatttgaacttggatctatctgagatctgagctaagtaagagaaggtaggagcagtgagcatgattaggtcatgcaggattgtgggtgccaagtttgggggtgctcaaactctaccagagacattggggagccatggcaggttctaggcagagggaggacagggtcaggtttggctttagaaagatcccttggcctcggctgggcacggtggctcacgcctgtaatcccagcactttgggaggccgaggagggcggatcacgaggtcaggagttcgagaccatcctggctaacacagtgaaaccccatctctactaaaaatacaaaaaattagccaggtgtggtggcgggcgcctgtagtcccagctacttgggaggctgaggcgggagaatggcatgaacccaggaggcggagcttgcagtgagctgagatctgccactgcactccagcctgggtgacagatcgagactccgtcttaaaaaaaaaaaatcccttggcctccaggccgggtgcagtggcttatgcctgtaatcccagcactctgggaggctgaggtgggcgtaaaacctgaggtcaggagttcaagaccagcctggccaacatggcgaaaccccgcatctactaacgatacaaaagttagccaggcgtgggggcgtgtctgtagtcccagctactcaggaggtttagggagggagaattgcttgaacccaggaagcggaggttgcagtgagcagaggtcatgccattgcactccagcctccaacctgggtgacaagagcgagattccatctcaaaaaaaaaaaaagaaaaaaagatcccttggcctccagagagcccacaatgcatgaaaagtaacagaggaaaagaagcaggtatgtgagatagcagggaggtgaagggagtggacagacaaggttgatgccacaagtcacataagaggggccaggaaatagccactggatctaccagcaagaaggctgatagtcgggaggatcatttgagtccaggagtttgagaccagcctgggcaatgtagtaggactccatctctacaaaaaaaaaaaaatatatgtatatagacatagccgggcatggtggcacatgcctgtggtctcagttgctcgggaggctgaggtaggagaatcacttgagcccgggagggtgaggctgcagtgagctatgatcttgccactggactccagcctgggccacagagacaccgtctaaaaaaaaaaaaaaaagggctgggcatggtggctcactcctgtaatcccagcactttgggaggccgaggtgggcggatcacctgatgtcaggagtttgagaccagcctggccaacatagtgaaaccccgtctctactaaaaatacaaaaaaattagccaggcgtggtggtgcacgcctgtagtcccagctactcaggaggctgaggcaggagaatcacttgaacctgggaggcaaaggttgcagtgagccaagatcgtgccactgcactccagcctgggcaacagagtgggactctgtctcaaaaaaaaaaagaaagaaaggcagccagggtgtgcaggacgctgtgggtatggacacctgagggtggtggtaactgagcggagatagtgtagtcatcatgtctagattccctgtgggtggggaacatggagtcaagtttcagggcaggcgtggggacctacctgtaagactctaggggcaggaagtagagtgtgcagagcctccctctagtagcctgttaggcttagaactggagaggatggagcatagatgtcagtaggaggctggggctgggcagaggtgatatcagtacacagaggccattattgaggagggtaacagattggattccaatcctgatttcttcactttcttgctatgtgacctggggcatggcccctcccttcctgcctcatttctttttttcctgtttttaatttttagtttttttaaaaagcagagatgaggtctctgttgcccaggttggtctcgaactcctgggcggctcaagtgatcctcccatcttggccttccaaagtgttgggattataggtgtgagccaccacgcccagcctgtgcctcattttaaaatgacacttatctcacagagttggattaaatcagccaatacctggaaagcactttaccccatgcttggcacacagtaaatactcagtgaagtgccagctgctatgattgtcatcccatgtatttgtgtaatgttattatgccaaaaaccagtctccttccttccctgccgccaaacctctgcatctcctcctccaggtgccttcaaatctcttgacaaagatggcactggacaaatccaggtgaacatccaggaggtaaggacccccatattggggtatgggtgcctgggaggaccccacccctcagcccttcataccagctctgagctgcagtccccttcctcctattttgccagccgtccctgggtgagggcaaaggggctggtgctcttggggttccctgtcctcactctccaccctcctctccccagtggctgcagctgactatgtattcctgaactggagccccagacccgccccctcactgccttgctataggagtcacctggagcctcggtctctcccagggccgatcctgtctgcagtcacatctttgtggggcctgctgacccacaagcttttgttctctcagtacttgttacccagcttctcaacatccagggcccaatttgccctgcctggagttccccctggctctaggacactctaacaagctctgtccacgggtctccccattcccaccaggccctgcacacacccactccgtaacctctcccctgtacctgtgccaagcctagcacttgtgatgcctccatgccccgagggccctctctcagttctgggaggatgactccagtccctgcacgccctggcacacccttcacggttgctacccaggcggccaagctccagaccgtgccagacccaggtgccccagtgcctttgtctatattctgctcccagcctgccaggcccaggaggaaataaacatgccccagttgctgatctctatgggatctgcctcctgatctgacccgagagaggaggggtggctcgggctctgggtcctggggagcaggggaggtagtagattcgtccccagggctggatccgtggatttcctcgtctttttctcgtcggcattttttgtctcatcctgagctgtggaggctgagacaggacccagaagccccagtgatctctgcttctgcttccagagtctgggctggagggaggtctcaatgccactcctggccctgtcccccaaggccatgtttgcccctcttgcagcttctccatccacacttggcctctgcctctgttgtgtcatggaccatgctcagtgtcttccttcccacttgaggacaccaccccacgtccccgggtcccgagggggagcctatgggtgctgtttggggtactcagcagagggctgagaggtagcaacatcctaggagtatccctggtccagcatgaggcaccgagggctgggggcagtgggcagtccacagggcagagatccctggctggtgggaggatgggcttggtggggaggggtggacacaaacacagacacacacagaggccagcgtttattgacacttgttcaagtctctcaggccccccaggcttcttggtcttaattcctggggaaggaggcccagccaagggagtacaagctgtagacagtgcctagaaaggggaagcgttggagacagaatgagacctaatcccctccctggacatcccaggcttttaaggccttcaggctccctggttcccagcctggaccccagctctagttcggactccagctcccttcccagattggactcctattgtaaagccccctggctttgatctagaccgggctgggagctttctccccgactcctccctgggcctcagccccaccactaacccagcccccgtcctgggacaagagcccaaaccctagttactcccctccctgcaggcctgactccagctcagtactcgacccccttcctaaacgccaacccccaacccagatc

SEQ ID NO: 736 - DNA, 3522 bp, Homo sapiens
acgcttgcgcggcgagtagaacgtgtggcggcggcggagatcgcgtctctttcgctccgtgtcccgctgctgctcctgtgagcgcccggcgagtccgtcccgtccaccgtccgcagctggtagccagcctgcccctcgcctcgactccctttcaccaacaccgacacccacattgacacctccagtccggccagccgctccactcgttgcctttgcatctccacacatggcgtcctccgcgcagagcggcggctcctccgggggacccgcggtccccaccgtgcagcggggcatcatcaagatggtcctctcagggtgcgccatcattgtccgaggtcagcctcgtggtgggcctcctcctgagcggcagatcaacctcagcaacattcgtgctggaaatcttgctcgccgggcagccgccacacaacctgatgcaaaggatacccctgatgagccctgggcatttccagctcgagagttccttcgaaagaagctgattgggaaggaagtctgtttcacgatagaaaacaagactccccaggggcgagagtatggcatgatctaccttggaaaagataccaatggggaaaacattgcagaatcactggttgcagagggcttagccacccggagagaaggcatgagagctaataatcctgagcagaaccggctttcagaatgtgaagaacaagcaaaggcagccaagaaagggatgtggagtgaggggaacggttcacatactatccgggatctcaagtataccattgaaaacccaaggcactttgtggactcacaccaccagaagcctgttaatgctatcatcgagcatgtgcgggacggcagtgtggtcagggccctgctcctcccagattactacctggttacagtcatgctgtcaggcatcaagtgcccaacttttcgacgggaagcagatggcagtgaaactccagagccttttgctgcagaagccaaatttttcactgagtcgcgactgcttcagagagatgttcagatcattctggagagctgccacaaccagaacattctgggtaccatccttcatccaaatggcaacatcacagagctcctcctgaaggaaggtttcgcacgctgtgtggactggtcgattgcagtttacacccggggcgcagaaaagctgagggcggcagagaggtttgccaaagagcgcaggctgagaatatggagagactatgtggctcccacagctaatttggaccaaaaggacaagcagtttgttgccaaggtgatgcaggttctgaatgctgatgccattgttgtgaagctgaactcaggcgattacaagacgattcacctgtccagcatccgaccaccgaggctggagggggagaacacccaggataagaacaagaaactgcgtcccctgtatgacattccttacatgtttgaggcccgggaatttcttcgaaaaaagcttattgggaagaaggtcaatgtgacggtggactacattagaccagccagcccagccacagagacagtgcctgccttttcagagcgtacctgtgccactgtcaccattggaggaataaacattgctgaggctcttgtcagcaaaggtctagccacagtgatcagataccggcaggatgatgaccagagatcatcacactacgatgaactgcttgctgcagaggccagagctattaagaatggcaaaggattgcatagcaagaaggaagtgcctatccaccgtgttgcagatatatctggggatacccaaaaagcaaagcagttcctgccttttcttcagcgggcaggtcgttctgaagctgtggtggaatacgtcttcagtggttctcgtctcaaactctatttgccaaaggaaacttgccttatcaccttcttgcttgcaggcattgaatgccccagaggagcccgaaacctcccaggcttggtgcaggaaggagagcccttcagcgaggaagctacacttttcaccaaggaactggtgctgcagcgagaggtggaggtggaggtggagagcatggacaaggccggcaactttatcggctggctgcacatcgacggtgccaacctgtccgtcctgctggtggagcacgcgctctccaaggtccacttcaccgccgaacgcagctcctactacaagtccctgctgtctgccgaggaggccgcaaagcagaagaaagagaaggtctgggcccactatgaggagcagcccgtggaggaggtgatgccagtgctggaggagaaggagcgatctgctagctacaagcccgtgtttgtgactgagatcactgatgacctgcacttctacgtgcaggatgtggagaccggcacccagttggagaagctgatggagaacatgcgcaatgacattgccagtcacccccctgtagagggctcctatgccccccgcaggggagagttctgcattgccaaatttgtagatggagaatggtaccgtgcccgagtagagaaagtcgagtctcctgccaaaatacatgtcttctacattgactacggcaacagagaggtcctgccatccacccgcctgggtaccctatcacctgccttcagcactcgggtgctgccagctcaagccacggagtatgccttcgccttcatccaggtgccccaagatgatgatgcccgcacggacgccgtggacagcgtagttcgggatatccagaacactcagtgcctgctcaacgtggaacacctgagtgccggctgcccccatgtcaccctgcagtttgcagattccaagggcgatgtggggctgggcttggtgaaggaagggctggtcatggtggaggtgcgcaaggagaaacagttccagaaagtgatcacagaatacctgaatgcccaagagtcagccaagagcgccaggctgaacctgtggcgctatggagactttcgagctgatgatgcagacgaatttggctacagccgctaaggaggggatcgggtttggcccccagccccgctcacgccagtccctcttcctctgccgggagggtgttttcaactccaaaccccagagaggggttgtagattgggtccagctttgcttcagtgtgtggaaatgtctcgtggggtggcatcggggctgcggggtggggaccccaaggctttctggggcagacccttgtcctctgggatgatgggcactgctatccacagtctctgccagttggttttatttggaggtttgtgggctttttttaaaaaaaaaaagtcctcaaatcaggaagaaacatcaaagactatgtcctagtggagggagtaatcctaacacccaggctggccgccagctggcacctgcctctatcccagactgccctcgtcccagctctctgtccaactgttgattatgtgatttttctgatacgtccattctcaaatgccagtgtgttcacatcttcgctctggccagcccattctgtatttaaagcttttgaggcccaataaaatagtacgtgctgtctgcagcccttattgatcaaaaaaaaaaaaaaa

SEQ ID NO: 737 - DNA, 2307 bp, Homo sapiens
ccaaagacatcctttggtgatacttactgtgggattcagagtggggtgcagaggacgaccctgcaaaggcacggactataagagagatctgtgcagctgcgcctcagggggtgtcctgggcccctgggcatgacaggagggggaccacttgcagttctactggaaaatttaccacccttccagaatcctctgaagatatacaggtcgcaactagagtgagacccgagtactgccttgggtcagaatggctagagaaccgagaaaaaacgcagccctggacgcccagtctgcagaagaccagacggggctcctgaccgtgaaggtggagaaggaggaagcctccgccttgacggcggaggtgagagcaccctgcagccctgctcggggccccgaacgctcccgccagcgcttccgaggcttccgctacccggaggctgcgggcccccgcgaggcgttgagccggctccgagaactctgcggacaatggctgcagcctgagatgcacagcaaggagcagatcctggagctgctggtgctggagcagttcctgaccatcctgccggggaatctgcagagctgggtgcgggagcagcatccagagagcggggaggaggtggtggtgctattggagtatttggagaggcagctggatgagccggcgccgcaggttcccgttggtgaccaggggcaagaactgctctgttgcaagatggcactattgacacaaactcaagggtctcaaagtagccagtgccagccaatgaaggctctgttcaagcatgaatctctgggatcccagcccttacacgatagagttctccaggttcctgggcttgcccagggagggtgctgcagagaagatgcaatggtagcttccaggctcactccagggtcccagggtttgctgaaaatggaagatgtggccctgaccctcactcctgggtggacacagctggattcatctcaggtgaacctctacagagatgaaaagcaggagaaccatagcagcctggtctcccttggtggtgaaatacagactaagagcagggacttgcctccagtcaagaagcttccagaaaaggagcatgggaagatatgccacctgagggaagacattgcccagattcctacacatgcagaagctggtgaacaggagggcaggttacaaagaaagcagaaaaatgccatagggagtaggcgacattattgccatgaatgtggaaagagttttgctcaaagttcaggcctgactaaacacaggagaatccacactggtgagaaaccctatgaatgtgaagactgtggaaagaccttcattgggagctctgcccttgtcattcatcagagagtccacactggtgagaagccatatgagtgtgaagaatgtggtaaggtcttcagtcacagctcaaaccttatcaaacaccagagaacccacactggggagaagccctatgagtgtgatgactgtgggaagaccttcagccagagctgcagcctccttgaacatcacaaaattcatactggggagaagccataccagtgcaatatgtgtggcaaagcctttaggcggaattcacatctcctgagacatcagaggattcatggtgataaaaatgttcagaatcctgagcacggggagtcctgggaaagtcagggtaggacggaaagccagtgggaaaatactgaggctcccgtgtcttataaatgtaatgagtgtgagagaagtttcacacggaatagaagtcttattgaacatcagaaaatccacactggtgagaaaccctatcagtgtgacacatgtggaaaaggtttcactcgaacttcataccttgttcaacatcagagaagccatgtagggaaaaaaactctttcacagtgacccatggtattcatgccaacattggtgctcatttgtcactgaactgaagccaccctggagcccttaatggttacagaaattgtggaccagggctttatttaccactatacatcatcgggtattagaaaatgtagtctggctgagacgatgagttatcttctacattctagaaagtgattggaagaagtcatttgataagaggccatgggagagtggtctggaagttgtaggacctaaaatagtttgttctcacccagtgtatttaaatggccttctggacttgttaattgccctcagccagcactttaggacatctggttggatggctctgatgtggggggctgctgctctgaccattcattttgcctctaatgaatctttcacaaattggtcagatccatgagaaaaaaaaaaaaaaaaaaaaa

SEQ ID NO: 738 - DNA, 2981 bp, Homo sapiens
tccccgcccctcggcccagcctgccagtcggaagtgcggccgccggaactggctgttggtgggggtgcagcactgagccgccgacggggcgggtgggctttgctgccgagcaggcggcgccgtcttggggcctagcggcgaggcgacccgcacaggtgggcggtggcggtaggtgggtggccagcgactggcaacgcggtggcttagacgcgcgagatccggccagggtcagagtactgtaagattgatgttaaaggcatggtgttcaccccacttcatcagcgtacataagttatctcttcttttggacccttattttatgccataatgcaacaagctttagaactagctttggatcgtgcagagtatgtcattgaaagtgcccgacagagacctcctaaaaggaaatacctatcaagtggaagaaaatctgtatttcaaaaactttatgacttgtatattgaagaatgtgaaaaagaacctgaagttaagcagaaattaagaagaaatgtgaacttgttagagaagcttgttatgcaagagactttgtcatgtttagtggtcaatctatacccaggaaatgagggatattctctgatgctcaggggaaaaaacggatcagattccgagaccattcgactgccctatgaagaaggagagttgcttgaatatttggatgcagaagaattacctcctattttggttgatctcctagaaaaatctcaggttaatatttttcattgcggatgtgtcatagcagaaatacgtgactacaggcagtccagtaacatgaaatctcctggttaccaaagtcggcacattctcttacgtccaacaatgcagactttaatttgtgatgtacattcaataacaagtgataaccacaaatggacccaggaagacaaacttttgcttgagagccagctcatcctagctacagctgaaccactctgtcttgatccttctatagcagtcacctgcactgcaaacagactgctctataacaagcaaaagatgaacactcgcccaatgaaacggtgtttcaagaggtattccagatcctctctgaatcggcagcaagatctatctcattgtccacctcctcctcagctgaggttacttgatttcttacaaaaaagaaaggaaagaaaagcaggtcagcattatgacctcaaaatttctaaggcaggaaattgtgtagatatgtggaaacggagtccctgtaatttggccataccttctgaagtagatgtggagaaatatgctaaagtggaaaagtctatcaaatctgatgactcacagccaacagtctggccagcccatgatgtaaaagatgattatgtatttgaatgtgaagctggtactcagtatcagaaaacaaagctgaccatcttgcagtcgcttggagatccactttactatggtaaaatacagccatgtaaagcagatgaagaaagtgacagccagatgtctccatcacactcgtccacagatgatcattcaaattggttcattattggatcaaagaccgatgctgagagggtagtcaatcagtaccaagaattagtccagaatgaagccaaatgtccggtcaagatgtcacacagctccagtggctcagccagtctgagtcaggtttctccagggaaagaaacagatcaaactgaaaccgtgtcagttcagtcttcggtattggggaagggtgtaaaacatcgacccccaccaatcaaacttccctcaagctcaggaaatagttcctcaggtaactattttacaccacaacagacaagcagctttctcaaatctccaactcctcctccttcttctaagccatcaagtattcctcggaaatcatctgtggatctcaatcaagttagcatgctttctccagctgccctatcacctgccagctcatcacaaagaaccacggccacccaggtcatggcaaactctgctggacttaacttcatcaatgtagtgggctctgtttgtggggcccaggctttgatgagtggttcaaaccccatgctgggctgtaacactggtgccataactcctgcaggaataaacctgagcggccttctaccctcaggaggtctgctaccaaatgcactgcccagtgcaatgcaggcagcttctcaagcaggtgttccatttggtttaaaaaatacttcaagtctcaggcccttaaatctactccagcttccaggtggttcacttatttttaacactctgcagcagcagcaacagcagctctcccagtttacaccacaacaacctcagcagcccacaacttgtagtcctcaacagccaggggagcagggttctgagcaaggttcaaccagtcaagaacaggccttatctgctcagcaagctgctgttattaaccttactggagtaggaagttttatgcagtcacaggcagctgcagttgcgattcttgcagcatcaaatggctatggcagcagcagcagcacaaacagctcagctacatcatcatcggcatacaggcagccagtcaaaaagtaaaatgaagagaggcacgccaaccactccaaaattttgagtcttgcattactttttgttccttttttaaaaacacaagagcactgaatcaaaagaattgagtttctactttttgttttttttaatgtgtcagtattttacattgctagatgtacaaactttatacagaagcacaaccttatcatttttaaataaaaacagggaaatggtttaacaaactagggttggtttgcctaagtcattgctttttaaaaatggtttcactatacataatatatatggaagtgacctaagaaataatagaaacatctttcagaagaatgtagtttgatatttatttagtataaaacgtttgtgcacagtgttaacaaatacaatttttacaaatctgttttgaaaaaaaaaaaaaaaaaaaaaaaaaaaaaaaaaaaaaaaaaaaaaaaaaaaaaaaaaaa

SEQ ID NO: 739 - DNA, 1967 bp, Homo sapiens
ctgtcctgggattgcctggagctccgcaccgcgagtttgccgcggcactttccgcgcggcggaagagcgcgcgccagcttcggcacacctgggagccggatcccagccctacgcctcgtcccctacaagctcctccaagccccgccggctgctgtgggagcggcggccgtccctctcctggaggtcgtctcctggcatcctcggggccgcaggaaggaagaggaggcagcggccggagccctggtgggcggcctgaggtgagagcccgaccggcccctttgggaatatggcgaccggtggctaccggaccagcagcggcctcggcggcagcaccacagacttcctggaggagtggaaggcgaaacgcgagaagatgcgcgccaagcagaaccccccgggcccggcccccccgggagggggcagcagcgacgccgctgggaagccccccgcgggggctctgggcaccccggcggccgccgctgccaacgagctcaacaacaacctcccgggcggcgcgccggccgcacctgccgtccccggtcccgggggcgtgaactgcgcggtcggctccgccatgctgacgcgggcggcccccggcccgcggcggtcggaggacgagcccccagccgcctctgcctcggctgcaccgccgccccagcgtgacgaggaggagccggacggcgtcccagagaagggcaagagctcgggccccagtgccaggaaaggcaaggggcagatcgagaagaggaagctgcgggagaagcggcgctccaccggcgtggtcaacatccctgccgcagagtgcttagatgagtacgaagatgatgaagcagggcagaaagagcggaaacgagaagatgcaattacacaacagaacactattcagaatgaagctgtaaacttactagatccaggcagttcctatctgctacaggagccacctagaacagtttcaggcagatataaaagcacaaccagtgtctctgaagaagatgtctcaagtagatattctcgaacagatagaagtgggttccctagatataacagggatgcaaatgtttcaggtactctggtttcaagtagcacactggaaaagaaaattgaagatcttgaaaaggaagtagtaagagaaagacaagaaaacctaagacttgtgagactgatgcaagataaagaggaaatgattggaaaactcaaagaagaaattgatttattaaatagagacctagatgacatagaagatgaaaatgaacagctaaagcaggaaaataaaactcttttgaaagttgtgggtcagctgaccaggtagaggattcaagactcaatgtggaaaaaatattttaaactactgattgaatgttaatggtcaatgctagcacaatattcctatgctgcaatacattaaaataactaagcaagtatatttatttctagcaaacagatgtttgttttcaaaatacttctttttcattattggttttaaaaaagcattatccttttatctcacaaataagtaatatctttcagttattaaatgatagataatgcctttttggttttgtgtggtattcaactaatacatggtttaaagtcacagccgtttgaatatattttatcttggtagtacattttctcccttaggaatatacatagtctttgtttacatgagttcaaatacttttgggatgttaccttcacatgtcctattactgatgtgtgcaaccttttatgtgttgatgactcactcataaaggtttttgtctactgtcatttgttctttccacttattctaagcatttagagtaatagagtcatacttttttataacagcaaccttttaaaaggaaagctcttataaagtcactgtcatgttttagttgactaaatataaatttaagagaatacttgaattgtgctatagtaaataaaaatttactattttgtgtttgaaaaaaaaaaaaaaaaaa

SEQ ID NO: 740 - DNA, 2838 bp, Homo sapiens
aaattgattcccgcacgctgcagcctcccggtcagacgaatttctcccaatcggatgaagttcaccctgggcctggggtcgcgggcgtggagagtgtcctgggagggggcagcagcggcggcggcaggccctggagcgggcggcagcgcgctccgctgccgcgcacagcgcgtctccagcccgcggctgggccgccgcggctctcggctctcgggcgccctccctctatgcctctcacgcggcggcggcggcgcccaagctctcccggactgcgccgggcccagccccggccaccccggccaccccggcgccaggcagctggccggcccgctcgctatggagcagacgtatggcgaggtgaaccagctgggcggtgtgttcgtcaacggccgccccctgcccaacgccatccgcttgcgcattgtggagctggcgcagctgggcatccgaccctgtgacatcagtcggcagctccgcgtatcccacggctgcgtgagcaagatcctggcgcgctacaacgagaccggctccattctgcccggggccatcggggggagcaagccccgcgtcaccactcccaacgtggtcaagcacatccgggactacaagcaaggagaccctggcatctttgcctgggagatccgcgaccggctgctggccgacggcgtctgtgacaagtacaatgtgccttcggtgagctccatcagccgcatcctgcgcaacaagatcggcagcctggcgcagcccggaccgtacgaggcaagtaagcagccgccgtcgcagcctacgctgccctacaaccacatctaccagtacccctaccccagtcccgtgtcgcccacgggcgccaagatgggcagccaccccggggtcccgggcacggcgggccacgtcagcatcccgcgctcatggccctcggcacactcggtcagcaacatcctgggcatccggacgtttatggagcaaacaggggccctggctgggagcgaaggcaccgcttactctcccaagatggaagactgggccggcgtgaaccgcacggccttccccgccacccccgcagtgaatgggctagagaaacctgccttagaggcagacattaaatacactcagtcggcctccaccctctctgccgtgggcggctttctccccgcctgcgcctacccggcctccaaccagcacggcgtgtacagcgccccgggcggcggctacctcgccccgggcccgccgtggccgcctgcgcaaggtcctcctctggcgccccccggggccggcgtagctgtgcatggcggggaactcgcggcagcaatgaccttcaagcatcccagccgagaaggaagcctcccagctccggcagcaaggccccggacgccctcagtagcttacacggactgcccatcccggcctcgacctcctaggggcagctctccccggacccgagcccggagggaacggcaggcggacccgggcgcacaggtctgcgcggcggccccggcaatcggcacgggcaggatcggaggactcgcggaggaggaagccagtgccggcccgcggggtgcacgcccagccagcccccaggcccagccctgcctctggccggacccaccacacttcctttattggtctgggtttttaggcttctctgaacttgggttttagactgccgtaccctcctcacaatccttgctctgacgtggcctccttcgctctgccagcttcaaatttcttttttgtcactcccttgtccgtctccgtctcgcctctctccctgtttccttcccccctctttctttctcactctccctcccttccctttctctttcccttcctccctaccttccaccccggctttccccgaccttccagggctccctctgcccttccactctcttttccttgctccgacctctgctccagtcccgcttcttcccccgtctcctctttctagtcctctatatgctatcagccctttttcctggtccatccctgtcgttccttctctctctgtctctggttctactgtcaagggccctagttccctttgttttactgcttccccaaccctccctcagtccctgagagccctagagccatctcggtgacagtcccttctctggcacctgggactttgtagccttcactcctctgagcccaccagccctaatggaggggggctcaaacctaggaagtggacagaaaagccacagcctttattttgtattttttttgtaataacaaaccctaaaaaaccctccatgaactgtcctctcccgtcgatccccgcagcatattgtctggaaatctgttttctttctcagagcccagtggccgccgggcttctcttcccttctgagatgatgtcaccccaaagaagactggggtaggagtagggagcacaggggttgttggtgttttcagtgcttagaaaactgggttgtcctgcaggtgtctcctcccacccctccactcgcaacacttgctagggaatccgaccagtggtaaacacatcagcactttttggtgttcaggggtcagcacatttgttaatttaaaccacagactgcttccaggtacaaaggttcatttggacttctggtttgcaagggatgagggttaaaaaaaacaaaacaaaacaaacaacaacaacaacaaaaacaacccagaaagtatcttctagagccagccgcaagagctgtgagctgcttccaagttaggcgagctggtggtggtaccctggacataatgcaattctgtagtcagagcaatatccctggcgagagcctgacatcgcctgttaaaggtggctgcctctgaataaaggaaagcgtctgaaaggtg

SEQ ID NO: 741 - DNA, 4054 bp, Homo sapiens
cgggggcctggcccgcgcgctcccctcccgcaggcgccacctcggacatccccgggattgctacttctctgccaacttcgccaactcgccagcacttggagaggcccggctcccctcccggcgccctctgaccgcccccgccccgcgcgctctccgaccaccgcctctcggatgaccaggttccaggggagctgagcgagtcgcctcccccgcccagcttcagccctggctgcagctgcagcgcgagccatgcgcccccagtgcaccccggcccggcccaccgccccggggccattctgctgaccgcccagccccgagccccgacagtggcaagttgcggctactgcagttgcaagctccggccaacccggaggagccccagcggggagcgcagtgctgcgccccccgcccccgcgcgccccgcagcagccgggcgttcactcatcctccctcccccaccgtccctcccttttctcctcaagtcctgaagttgagtttgagaggcgacacggcggcggcggccgcgctgctcccgctcctctgcctccccatggatatgcactgcaaagcagaccccttctccgcgatgcacccagggcacgggggtgtgaaccagctcgggggggtgtttgtgaacggccggcccctacccgacgtggtgaggcagcgcatcgtggagctggcccaccagggtgtgcggccctgtgacatctcccggcagctgcgggtcagccacggctgtgtcagcaaaatcctgggcaggtactacgagaccggcagcatcaagccgggtgtgatcggtggctccaagcccaaagtggcgacgcccaaagtggtggacaagattgctgaatacaaacgacagaacccgactatgttcgcctgggagattcgagaccggctcctggccgagggcatctgtgacaatgacacagtgcccagcgtctcttccatcaacagaatcatccggaccaaagttcagcagcctttccacccaacgccggatggggctgggacaggagtgaccgcccctggccacaccattgttcccagcacggcctcccctcctgtttccagcgcctccaatgacccagtgggatcctactccatcaatgggatcctggggattcctcgctccaatggtgagaagaggaaacgtgatgaagatgtgtctgagggctcagtccccaatggagattcccagagtggtgtggacagtttgcggaagcacttgcgagctgacaccttcacccagcagcagctggaagctttggatcgggtctttgagcgtccttcctaccctgacgtcttccaggcatcagagcacatcaaatcagaacaggggaacgagtactccctcccagccctgacccctgggcttgatgaagtcaagtcgagtctatctgcatccaccaaccctgagctgggcagcaacgtgtcaggcacacagacatacccagttgtgactggtcgtgacatggcgagcaccactctgcctggttacccccctcacgtgccccccactggccagggaagctaccccacctccaccctggcaggaatggtgcctgggagcgagttctccggcaacccgtacagccacccccagtacacggcctacaacgaggcttggagattcagcaaccccgccttactaagttccccttattattatagtgccgccccccggtccgcccctgccgctgctgccgctgcctatgaccgccactagttaccgcggggaccacatcaagcttcaggccgacagcttcggcctccacatcgtccccgtctgaccccaccccggagggagggaggaccgacgcgacgcgatgcctcccggccaccgccccagcctcaccccatcccacgacccccgcaacccttcacatcacccccctcgaaggtcggacaggacgggtggagccgtgggcgggaccctcaggcccgggcccgccgcccccagccccgcctgccgcccctccccgcctgcctggactgcgcggcgccgtgagggggattcggcccagctcgtcccggcctccaccaagccagccccgaagcccgccagccaccctgccggactcgggcgcgacctgctggcgcgcgccggatgtttctgtgacacacaatcagcgcggaccgcagcgcggcccagccccgggcacccgcctcggacgctcgggcgccaggaggcttcgctggaggggctgggccaaggagattaagaagaaaacgactttctgcaggaggaagagcccgctgccgaatccctgggaaaaattcttttcccccagtgccagccggactgccctcgccttccgggtgtgccctgtcccagaagatggaatgggggtgtgggggtccggctctaggaacgggctttgggggcgtcaggtctttccaaggttgggacccaaggatcggggggcccagcagcccgcaccgatcgagccggactctcggctcttcactgctcctcctggcctgcctagttccccagggcccggcacctcctgctgcgagacccggctctcagccctgccttgcccctacctcagcgtctcttccacctgctggcctcccagtttcccctcctgccagtccttcgcctgtcccttgacgccctgcatcctcctccctgactcgcagccccatcggacgctctcccgggaccgccgcaggaccagtttccatagactgcggactggggtcttcctccagcagttacttgatgccccctcccccgacacagactctcaatctgccggtggtaagaaccggttctgagctggcgtctgagctgctgcggggtggaagtggggggctgcccactccactcctcccatcccctcccagcctcctcctccggcaggaactgaacagaaccacaaaaagtctacatttatttaatatgatggtctttgcaaaaaggaacaaaacaacacaaaagcccaccaggctgctgctttgtggaaagacggtgtgtgtcgtgtgaaggcgaaacccggtgtacataacccctccccctccgccccgccccgcccggccccgtagagtccctgtcgcccgccggccctgcctgtagatacgccccgctgtctgtgctgtgagagtcgccgctcgctgggggggaagggggggacacagctacacgcccattaaagcacagcacgtcctgggggaggggggcattttttatgttacaaaaaaaaattacgaaagaaaagaaatctctatgcaaaatgacgaacatggtcctgtggactcctctggcctgttttgttggctctttctctgtaattccgtgttttcgctttttcctccctgcccctctctccctctgcccctctctcctctccgcttctctccccctctgtctctgtctctctccgtctctgtcgctcttgtctgtctgtctctgctctttcctcggcctctctccccagacctggcccggccgccctgtctccgcaggctagatccgaggtggcagctccagcccccgggctcgccccctcgcgggcgtgccccgcgcgccccgggcggccgaaggccgggccgccccgtcccgccccgtagttgctctttcggtagtggcgatgcgccctgcatgtctcctcacccgtggatcgtgacgactcgaaataacagaaacaaagtcaataaagtgaaaataaataaaaatccttgaacaaatccgaaaaggcttggagtcctcgcccagatctctctcccctgcgagccctttttatttgagaaggaaaaagagaaaagagaatcgtttaagggaacccggcgcccagccaggctccagtggcccgaacggggcggcgagggcggcgagggcgccgaggtccggcccatcccagtcctgtggggctggccgggcagagaccccggacccaggcccaggcctaacctgctaaatgtccccggacggttctggtctcctcggccactttcagtgcgtcggttcgttttgattctttttcttttgtgcacataagaaataaataataataataaataaagaataaaattttgtatgtca

SEQ ID NO: 742 - DNA, 1489 bp, Homo sapiens
aggaggagactcaggcaggccgcgctccagcctcaccaggctccccggctcgccgtggctctctgagcccccttttcagggaccccagtcgctggaacatttgcccagactcgtaccaaacttttccgccctgggctcgggatcctggactccggggcctccccgtcctcccctttcccgggttccagctccggcctctggactaggaaccgacagcccccctccccgcgtccctccctctctctccagccgttttggggaggggctctccacgctccggatagttcccgagggtcatccgcgccgcactcgcctttccgtttcgccttcacctggatataatttccgagcgaagctgcccccaggatgaccacgctggccggcgctgtgcccaggatgatgcggccgggcccggggcagaactacccgcgtagcgggttcccgctggaagtgtccactcccctcggccagggccgcgtcaaccagctcggcggtgtttttatcaacggcaggccgctgcccaaccacatccgccacaagatcgtggagatggcccaccacggcatccggccctgcgtcatctcgcgccagctgcgcgtgtcccacggctgcgtctccaagatcctgtgcaggtaccaggagactggctccatacgtcctggtgccatcggcggcagcaagcccaagcaggtgacaacgcctgacgtggagaagaaaattgaggaatacaaaagagagaacccgggcatgttcagctgggaaatccgagacaaattactcaaggacgcggtctgtgatcgaaacaccgtgccgtcagtgagttccatcagccgcatcctgagaagtaaattcgggaaaggtgaagaggaggaggccgacttggagaggaaggaggcagaggaaagcgagaagaaggccaaacacagcatcgacggcatcctgagcgagcgaggtaagcggtggcgccttgggcggcgcacttgctgggtgacttggagggcatcggctagctgacattggtgatctgacggcagccaagcccagctcggatcaaggtcccttcatgcgcggtgtctctgcgcctgagtaacgacatggaactgaaagaccagagggacactaggaatcaaaacaaacatttctattctgcttagtttttctgttttgtaaatctttctttcttaaccactttcagcccctgggattctagaactgtgaattgtgctctgttgtagggggcaggggaagctctcactctgttgccattaaatgtatgagactgggcatctctgagcaattgtagggccggggatagagggtacttgaatcttcagaagttgaagtagcttttatgccctcaggaaaggccctggtctccggagtttcctcgcattaaaggagagagagagagagtactcttttgggcaacggccctccaaaattgcccccacattggctgccttataaatatgtctgtgtgttgactggt

SEQ ID NO: 743 - DNA, 2010 bp, Homo sapiens
caaagactcacccgtgagccagctctcaaagaaagcagcttgcgttgacagcctgggggcagcaaggatgcagtctcccaggagaggatgcactcggtggtgggaagccaggctggaggggcctgagtgaccctctccacaggcgggcagggcagtgggagaggtggtgtgtggatacctctgtctcacgcccagggatcagcagcatgaaccagcttggggggctctttgtgaatggccggcccctgcctctggatacccggcagcagattgtgcggctagcagtcagtggaatgcggccctgtgacatctcacggatccttaaggtatctaatggctgtgtgagcaagatcctagggcgttactaccgcacaggtgtcttggagccaaagggcattgggggaagcaagccacggctggctacaccccctgtggtggctcgaattgcccagctgaagggtgagtgtccagccctctttgcctgggaaatccaacgccagctttgtgctgaagggctttgcacccaggacaagactcccagtgtctcctccatcaaccgagtcctgcgggcattacaggaggaccagggactaccgtgcacacggctcaggtcaccagctgttttggctccagctgtcctcactccccatagtggctctgagactccccggggtacccacccagggaccggccaccggaatcggactatcttctccccaagccaagcagaggcactggagaaagagttccagcgtgggcagtatcctgattcagtggcccgtggaaagctggctactgccacctctctgcctgaggacacggtgagggtctggttttccaacagaagagccaaatggcgtcggcaagagaagctcaagtgggaaatgcagctgccaggtgcttcccaggggctgactgtaccaagggttgccccaggaatcatctctgcacagcagtcccctggcagtgtgcccacagcagccctgcctgccctggaaccactgggtccctcctgctatcagctgtgctgggcaacagcaccagaaaggtgtctgagtgacaccccacctaaagcctgtctcaagccctgctggggccacttgcccccacagccgaattccctggactcaggactgctttgccttccttgcccttcctcccactgtcacctggccagtcttagtggctctcaggccctgctctggcctggctgcccactactgtatggcttggaatgaggcaggagtgggaaggagatggcatagagaagatctaataccatcctgcccattgtccttaccgtcctgcccatacagactgtggctccttcctccttcctgtgattgctccctcctgtgtggacgttgcctggccctgcctcgatgcctctctggcgcatcacctgattggaggggctggtaaagcaacacccacccacttctcacactagccttaagaggcctccactcagcagtaataaaagctgtttttattagcagtagttctgttgtccatcatgttttccctatgagcacccctatgcccactctaatattcaacaattatagacaatttgccctatcatttatttacatctatgtatctaccatctaatctatgcatgtatgtaggcaatacatgtatctaaacaatgtatttgtcaatgcatcaatttacctactctatgtatgcatctatatgtgtattatgtatgcgtgcatgcgtgcgcgcacacacacacacacacacacacactgacattatatcatggcattttattcctaaatcttccagcatgcatccccaaaaaacaagaaacttgtcttacataatcacaataatatatccacatctaagaaaatttactgtaacttcttaatctaagaaaattatgtatttttgtcatatgtattttgtcatatgtattttgtatttgcatatgtattttgtatttgcatatgtatttttgtcatagcagcaaacagagtgaaatgccatttttcatattct

SEQ ID NO: 744 - DNA, 3650 bp, Homo sapiens
agcactgctgctctcccggcttcccgctctactccggccgggccgggtccgccacgtctggcgcgctgagcaggcccggccgcgcagcgcctaccctttcctcgctccgggccggcagtgtggggcggcgcgctgggggcgcggcgtgtctggggacatcttgtgatgttggcgagaacaggacatgatctcacatggcgagaagctctttagttccttaatcatttcacggtgccttcggacgctttttttccacctaaaacgtttagtttcagctcagtgatcagctaccccagctcggcgggggagcggaaggcttgaattattccgacctgtgagcggcccctggcaccaaaaaaaaaaaaaaaaaaaaaaaaaaaagaaaaaaaaaggcacaaaaaagtggaaacttttccctgtccattccatcaagtcctgaaaaatcaaaatggatttagagaaaaattatccgactcctcggaccagcaggacaggacatggaggagtgaatcagcttgggggggtttttgtgaatggacggccactcccggatgtagtccgccagaggatagtggaacttgctcatcaaggtgtcaggccctgcgacatctccaggcagcttcgggtcagccatggttgtgtcagcaaaattcttggcaggtattatgagacaggaagcatcaagcctggggtaattggaggatccaaaccaaaggtcgccacacccaaagtggtggaaaaaatcgctgaatataaacgccaaaatcccaccatgtttgcctgggagatcagggaccggctgctggcagagcgggtgtgtgacaatgacaccgtgcctagcgtcagttccatcaacaggatcatccggacaaaagtacagcagccacccaaccaaccagtcccagcttccagtcacagcatagtgtccactggctccgtgacgcaggtgtcctcggtgagcacggattcggccggctcgtcgtactccatcagcggcatcctgggcatcacgtcccccagcgccgacaccaacaagcgcaagagagacgaaggtattcaggagtctccggtgccgaacggccactcgcttccgggcagagacttcctccggaagcagatgcggggagacttgttcacacagcagcagctggaggtgctggaccgcgtgtttgagaggcagcactactcagacatcttcaccaccacagagcccatcaagcccgagcagaccacagagtattcagccatggcctcgctggctggtgggctggacgacatgaaggccaatctggccagccccacccctgctgacatcgggagcagtgtgccaggcccgcagtcctaccccattgtgacaggccgtgacttggcgagcacgaccctccccgggtaccctccacacgtcccccccgctggacagggcagctactcagcaccgacgctgacagggatggtgcctgggagtgagttttccgggagtccctacagccaccctcagtattcctcgtacaacgactcctggaggttccccaacccggggctgcttggctccccctactattatagcgctgccgcccgaggagccgccccacctgcagccgccactgcctatgaccgtcactgacccttggagccaggcgggcaccaaacactgatggcacctattgagggtgacagccacccagccctcctgaagatagccagagagcccatgagaccgtcccccagcatcccccacttgcctgaagctcccctcttcctctcttcctccagggactctggggccctttggtggggccgttggacttctggatgcttgtctatttctaaaagccaatctatgagcttctcccgatggccactgggtctctgcaaaccaatagactgtcctgcaaataaccgcagccccagcccagcctgcctgtcctccagctgtctgactatccatccatcataaccaccccagcctgggaaggagagcttgcttttgttgcttcagcagcacccatgtaaataccttcttgcttttctgtgggcctgaaggtccgactgagaagactgctccacccatgatgcatctcgcactcttggtgcatcaccggacatcttagacctatggcagagcatcctctctgccctgggtgaccctggcaggtgcgctcagagctgtcctcaagatggaggatgctgcccttgggccccagcctcctgctcatccctccttctttagtatctttacgaggagtctcactgggctggttgtgctgcaggctccccctgaggcccctctccaagaggagcacactttggggagatgtcctggtttcctgcctccatttctctgggaccgatgcagtatcagcagctcttttccagatcaaagaactcaaagaaaactgtctgggagattcctcagctacttttccgaagcagaatgtcatccgaggtattgattacattgtggactttgaatgtgagggctggatgggacgcaggagatcatctgatcccagccaaggaggggcctgaggctctccctactccctcagcccctggaacggtgttttctgaggcatgcccaggttcaggtcacttcggacacctgccatggacacttcacccaccctccaggaccccagcaagtggattctgggcaagcctgttccggtgatgtagacaataattaacacagaggactttcccccacacccagatcacaaacagcctacagccagaacttctgagcatcctctcggggcagaccctccccgtcctcgtggagcttagcaggcagctgggcatggaggtgctggggctggggcagatgcctaatttcgcacaatgcatgcccacctgttgatctaaggggccgcgatggtcagggccacggccaagggccacgggaacttggagagggagcttggagaactcactgtgggctagggtggtcagaggaagccagcagggaagatctgggggacagaggaaggcctcctgagggaggggcaggagagcagtgaggagctgctgtgtgacctgggagtgattttgacatgggggtgccaggtgccatcatctctttacctggggccttaattccttgcatagtctctcttgtcaagtcagaacagccaggtagagcccttgtccaaacctgggctgaatgacagtgatgagagggggcttggccttcttaggtgacaatgtcccccatatctgtatgtcaccaggatggcagagagccagggcagagagagactggacttgggatcagcaggccaggcaggtcttgtcctggtcctggccacatgtctttgctgtgggacctcagacaaaaccctgcacctctttgagccttggctgccttggtgcagcagggtcatctgtagggccaccccacagctctttccttcccctcctctctccagggagccggggctgtgagaggatcatctggggcaggccctccacttccaagcaagcagatgggggtgggcacctgaggcccaataatatttggaccaagtgggaaacaagaacactcggaggggcgggaatcagaagagcctggaaaaagacctagcccaacttcccttgtgggaaactgaggcccagcttggggaaggccaggaccatgcagggagaaaaag

SEQ ID NO: 745 - DNA, 6947 bp, Homo sapiens
ggtgcatttgcatgttgcggagtgattagtgggtttgaaaagggaaccgtggctcggcctcatttcccgctctggttcaggcgcaggaggaagtgttttgctggaggatgatgacagaggtcaggcttcgctaatgggccagtgaggagcggtggaggcgaggccgggcgccggcacacacacattaacacacttgagccatcaccaatcagcataggaatctgagaattgctctcacacaccaacccagcaacatccgtggagaaaactctcaccagcaactcctttaaaacaccgtcatttcaaaccattgtggtcttcaagcaacaacagcagcacaaaaaaccccaaccaaacaaaactcttgacagaagctgtgacaaccagaaaggatgcctcataaagggggaagactttaactaggggcgcgcagatgtgtgaggccttttattgtgagagtggacagacatccgagatttcagagccccatattcgagccccgtggaatcccgcggcccccagccagagccagcatgcagaacagtcacagcggagtgaatcagctcggtggtgtctttgtcaacgggcggccactgccggactccacccggcagaagattgtagagctagctcacagcggggcccggccgtgcgacatttcccgaattctgcaggtgtccaacggatgtgtgagtaaaattctgggcaggtattacgagactggctccatcagacccagggcaatcggtggtagtaaaccgagagtagcgactccagaagttgtaagcaaaatagcccagtataagcgggagtgcccgtccatctttgcttgggaaatccgagacagattactgtccgagggggtctgtaccaacgataacataccaagcgtgtcatcaataaacagagttcttcgcaacctggctagcgaaaagcaacagatgggcgcagacggcatgtatgataaactaaggatgttgaacgggcagaccggaagctggggcacccgccctggttggtatccggggacttcggtgccagggcaacctacgcaagatggctgccagcaacaggaaggagggggagagaataccaactccatcagttccaacggagaagattcagatgaggctcaaatgcgacttcagctgaagcggaagctgcaaagaaatagaacatcctttacccaagagcaaattgaggccctggagaaagagtttgagagaacccattatccagatgtgtttgcccgagaaagactagcagccaaaatagatctacctgaagcaagaatacaggtatggttttctaatcgaagggccaaatggagaagagaagaaaaactgaggaatcagagaagacaggccagcaacacacctagtcatattcctatcagcagtagtttcagcaccagtgtctaccaaccaattccacaacccaccacaccggtttcctccttcacatctggctccatgttgggccgaacagacacagccctcacaaacacctacagcgctctgccgcctatgcccagcttcaccatggcaaataacctgcctatgcaacccccagtccccagccagacctcctcatactcctgcatgctgcccaccagcccttcggtgaatgggcggagttatgatacctacacccccccacatatgcagacacacatgaacagtcagccaatgggcacctcgggcaccacttcaacaggactcatttcccctggtgtgtcagttccagttcaagttcccggaagtgaacctgatatgtctcaatactggccaagattacagtaaaaaaaaaaaaaaaaaaaaaaaggaaaggaaatattgtgttaattcagtcagtgactatggggacacaacagttgagctttcaggaaagaaagaaaaatggctgttagagccgcttcagttctacaattgtgtcctgtattgtaccactggggaaggaatggacttgaaacaaggacctttgtatacagaaggcacgatatcagttggaacaaatcttcattttggtatccaaacttttattcattttggtgtattatttgtaaatgggcatttgtatgttataatgaaaaaaagaacaatgtagactggatggatgtttgatctgtgttggtcatgaagttgttttttttttttttaaaaagaaaaccatgatcaacaagctttgccacgaatttaagagttttatcaagatatatcgaatacttctacccatctgttcatagtttatggactgatgttccaagtttgtatcattcctttgcatataattaaacctggaacaacatgcactagatttatgtcagaaatatctgttggttttccaaaggttgttaacagatgaagtttatgtgcaaaaaagggtaagatataaattcaaggaagaaaaaaagttgatagctaaaaggtagagtgtgtcttcgatataatccaatttgttttatgtcaaaatgtaagtatttgtcttccctagaaatcctcagaatgatttctataataaagttaatttcatttatatttgacaagaatatagatgttttatacacattttcatgcaatcatacgtttcttttttggccagcaaaagttaattgttcttagatatagttgtattactgttcacggtccaatcattttgtgcatctagagttcattcctaatcaattaaaagtgcttgcaagagttttaaacttaagtgttttgaagttgttcacaactacatatcaaaattaaccattgttgattgtaaaaaaccatgccaaagcctttgtatttcctttattatacagttttctttttaaccttatagtgtggtgttacaaattttatttccatgttagatcaacattctaaaccaatggttactttcacacacactctgttttacatcctgatgatccttaaaaaataatccttatagataccataaatcaaaaacgtgttagaaaaaaattccacttacagcagggtgtagatctgtgcccatttatacccacaacatatatacaaaatggtaacatttcccagttagccatttaattctaaagctcaaagtctagaaataatttaaaaatgcaacaagcgattagctaggaattgttttttgaattaggactggcattttcaatctgggcagatttccattgtcagcctatttcaacaatgatttcactgaagtatattcaaaagtagatttcttaaaggagactttctgaaagctgttgcctttttcaaataggccctctcccttttctgtctccctcccctttgcacaagaggcatcatttcccattgaaccactacagctgttcccatttgaatcttgctttctgtgcggttgtggatggttggagggtggaggggggatgttgcatgtcaaggaataatgagcacagacacatcaacagacaacaacaaagcagactgtgactggccggtgggaattaaaggccttcagtcattggcagcttaagccaaacattcccaaatctatgaagcagggcccattgttggtcagttgttatttgcaatgaagcacagttctgatcatgtttaaagtggaggcacgcagggcaggagtgcttgagcccaagcaaaggatggaaaaaaataagcctttgttgggtaaaaaaggactgtctgagactttcatttgttctgtgcaacatataagtcaatacagataagtcttcctctgcaaacttcactaaaaagcctgggggttctggcagtctagattaaaatgcttgcacatgcagaaacctctggggacaaagacacacttccactgaattatactctgctttaaaaaaatccccaaaagcaaatgatcagaaatgtagaaattaatggaaggatttaaacatgaccttctcgttcaatatctactgttttttagttaaggaattacttgtgaacagataattgagattcattgctccggcatgaaatatactaataattttattccaccagagttgctgcacatttggagacaccttcctaagttgcagtttttgtatgtgtgcatgtagttttgttcagtgtcagcctgcactgcacagcagcacatttctgcaggggagtgagcacacatacgcactgttggtacaattgccggtgcagacatttctacctcctgacattttgcagcctacattccctgagggctgtgtgctgagggaactgtcagagaagggctatgtgggagtgcatgccacagctgctggctggcttacttcttccttctcgctggctgtaatttccaccacggtcaggcagccagttccggcccacggttctgttgtgtagacagcagagactttggagacccggatgtcgcacgccaggtgcaagaggtgggaatgggagaaaaggagtgacgtgggagcggagggtctgtatgtgtgcacttgggcacgtatatgtgtgctctgaaggtcaggattgccagggcaaagtagcacagtctggtatagtctgaagaagcggctgctcagctgcagaagccctctggtccggcaggatgggaacggctgccttgccttctgcccacaccctagggacatgagctgtccttccaaacagagctccaggcactctcttggggacagcatggcaggctctgtgtggtagcagtgcctgggagttggccttttactcattgttgaaataatttttgtttattatttatttaacgatacatatatttatatatttatcaatggggtatctgcagggatgttttgacaccatcttccaggatggagattatttgtgaagacttcagtagaatcccaggactaaacgtctaaattttttctccaaacttgactgacttgggaaaaccaggtgaatagaataagagctgaatgttttaagtaataaacgttcaaactgctctaagtaaaaaaatgcattttactgcaatgaatttctagaatatttttcccccaaagctatgcctcctaacccttaaatggtgaacaactggtttcttgctacagctcactgccatttcttcttactatcatcactaggtttcctaagattcactcatacagtattatttgaagattcagctttgttctgtgaatgtcatcttaggattgtgtctatattcttttgcttatttctttttactctgggcctctcatactagtaagattttaaaaagccttttcttctctgtatgtttggctcaccaaggcgaaatatatattcttctctttttcatttctcaagaataaacctcatctgcttttttgtttttctgtgttttggcttggtactgaatgactcaactgctcggttttaaagttcaaagtgtaagtacttagggttagtactgcttatttcaataatgttgacggtgactatctttggaaagcagtaacatgctgtcttagaaatgacattaataatgggcttaaacaaatgaataggggggtccccccactctccttttgtatgcctatgtgtgtctgatttgttaaaagatggacagggaattgattgcagagtgtcgcttccttctaaagtagttttattttgtctactgttagtatttaaagatcctggaggtggacataaggaataaatggaagagaaaagtagatattgtatggtggctactaaaaggaaattcaaaaagtcttagaacccgagcacctgagcaaactgcagtagtcaaaatatttatctcatgttaaagaaaggcaaatctagtgtaagaaatgagtaccatatagggttttgaagttcatatactagaaacacttaaaagatatcatttcagatattacgtttggcattgttcttaagtatttatatctttgagtcaagctgataattaaaaaaaatctgttaatggagtgtatatttcataatgtatcaaaatggtgtctatacctaaggtagcattattgaagagagatatgtttatgtagtaagttattaacataatgagtaacaaataatgtttccagaagaaaggaaaacacattttcagagtgcgtttttatcagaggaagacaaaaatacacacccctctccagtagcttatttttacaaagccggcccagtgaattagaaaaacaaagcacttggatatgatttttggaaagcccaggtacacttattattcaaaatgcacttttactgagtttgaaaagtttcttttatatttaaaataagggttcaaatatgcatattcaatttttatagtagttatctatttgcaaagcatatattaactagtaattggctgttaattttatagacatggtagccagggaagtatatcaatgacctattaagtattttgacaagcaatttacatatctgatgacctcgtatctctttttcagcaagtcaaatgctatgtaattgttccattgtgtgttgtataaaatgaatcaacacggtaagaaaaaggttagagttattaaaataataaactgactaaaatactcatttgaatttattcagaatgttcataatgctttcaaaggacatagcagagcttttgtggagtatccgcacaacattatttattatctatggactaaatcaattttttgaagttgctttaaaatttaaaagcacctttgcttaatataaagccctttaattttaactgacagatcaattctgaaactttattttgaaaagaaaatggggaagaatctgtgtctttagaattaaaagaaatgaaaaaaataaacccgacattctaaaaaaatagaataagaaacctgatttttagtactaatgaaatagcgggtgacaaaatagttgtctttttgattttgatcacaaaaaataaactggtagtgacaggatatgatggagagatttgacatcctggcaaatcactgtcattgattcaattattctaattctgaataaaagctgtatacagtaaaa

SEQ ID NO: 746 - DNA, 2271 bp, Homo sapiens
gaaagctggtgtggagggagaagcgagtgtggtccggagaaagaaggcgtggagaagagggagggagcgagagcgagagaataaatatataaataaatacgagaacgaaatccactccgcagtctccgggctcggaaactttggccccgagcgccagagcgccagagcgcgagagcgcggcgctcgccactctgaggctggcggcctcgattccggccgcgttcccccggcccccctccgccgcggggcctggtctccgggttctgccaggcgcatcagcccgcacaacttctggccgaggccagccggcagaggcggacttggggttggagtgtttgtttgtttgaacttcctcgtcgtcgccaccttccctccccccaacctccaccccacctcacccccctccccagcttctggacgcgtttgactgcagccaggggtggggggtgggggtagggagtgtgtgtggaggggagggagaagaggttaaaaaaaagaagacgaagaagacggaaagaaagagatcgcagcaggggtgaagggagcggacgggaagcgatttttgccgactttggattcgtccccggcgtgcgcaagaatggcggcccttcccggcacggtaccgagaatgatgcggccggctccggggcagaactacccccgcacgggattccctttggaagtgtccaccccgcttggccaaggccgggtcaatcagctgggaggggtcttcatcaatgggcgacccctgcctaaccacatccgccacaagatagtggagatggcccaccatggcatccggccctgtgtcatctcccgacagctgcgtgtctcccacggctgcgtctccaagattctttgccgctaccaggagaccgggtccatccggcctggggccatcggcggcagcaagcccagacaggtggcgactccggatgtagagaaaaagattgaggagtacaagagggaaaacccaggcatgttcagctgggagatccgggacaggctgctgaaggatgggcactgtgaccgaagcactgtgccctcaggtttagtgagttcgattagccgcgtgctcagaatcaagttcgggaagaaagaggaggaggatgaagcggacaagaaggaggacgacggcgaaaagaaggccaaacacagcatcgacggcatcctgggcgacaaagggaaccggctggacgagggctcggatgtggagtcggaacctgacctcccactgaagcgcaagcagcgacgcagtcggaccacattcacggccgagcagctggaggagctggagaaggcctttgagaggacccactacccagacatatacacccgcgaggagctggcgcagaggaccaagctgacagaggcgcgtgtgcaggtctggttcagtaaccgccgcgcccgttggcgtaagcaggcaggagccaaccagctggcggcgttcaaccaccttctgccaggaggcttcccacccaccggcatgcccacgctgcccccctaccagctgccggactccacctaccccaccaccaccatctcccaagatgggggcagcactgtgcaccggcctcagcccctgccaccgtccaccatgcaccagggcgggctggctgcagcggctgcagccgccgacaccagctctgcctacggagcccgccacagcttctccagctactctgacagcttcatgaatccggcggcgccctccaaccacatgaacccggtcagcaacggcctgtctcctcaggtgatgagcatcttgggcaaccccagtgcggtgcccccgcagccacaggctgacttctccatctccccgctgcatggcggcctggactcggccacctccatctcagccagctgcagccagcgggccgactccatcaagccaggagacagcctgcccacctcccaggcctactgcccacccacctacagcaccaccggctacagcgtggaccccgtggccggctatcagtacggccagtacggccagagtgagtgcctggtgccctgggcgtcccccgtccccattccttctcccacccccagggcctcctgcttgtttatggagagctacaaggtggtgtcagggtggggaatgtccatttcacagatggaaaaattgaagtccagccagatggaacagttcacctaaaatgacactgagttgggcaaaacccaggacatctcctggctaagcctctgcttccgtactatggctccaacagaaataaaatacacaacacaaatatcaaaaaaaaaaaa

SEQ ID NO: 747 - DNA, 4065 bp, Homo sapiens
gggaacaaacttcagaaggaggagagacaccgggcccagggcaccctcgcgggcggacccaagcagtgagggcctgcagccggccggccagggcagcggcaggcgcggcccggacctacgggaggaagccccgagccctcggcgggctgcgagcgactccccggcgatgcctcacaactccatcagatctggccatggagggctgaaccagctgggaggggcctttgtgaatggcagacctctgccggaagtggtccgccagcgcatcgtagacctggcccaccagggtgtaaggccctgcgacatctctcgccagctccgcgtcagccatggctgcgtcagcaagatccttggcaggtactacgagactggcagcatccggcctggagtgatagggggctccaagcccaaggtggccacccccaaggtggtggagaagattggggactacaaacgccagaaccctaccatgtttgcctgggagatccgagaccggctcctggctgagggcgtctgtgacaatgacactgtgcccagtgtcagctccattaatagaatcatccggaccaaagtgcagcaaccattcaacctccctatggacagctgcgtggccaccaagtccctgagtcccggacacacgctgatccccagctcagctgtaactcccccggagtcaccccagtcggattccctgggctccacctactccatcaatgggctcctgggcatcgctcagcctggcagcgacaagaggaaaatggatgacagtgatcaggatagctgccgactaagcattgactcacagagcagcagcagcggaccccgaaagcaccttcgcacggatgccttcagccagcaccacctcgagccgctcgagtgcccatttgagcggcagcactacccagaggcctatgcctcccccagccacaccaaaggcgagcagggcctctacccgctgcccttgctcaacagcaccctggacgacgggaaggccaccctgaccccttccaacacgccactggggcgcaacctctcgactcaccagacctaccccgtggtggcagatcctcactcacccttcgccataaagcaggaaacccccgaggtgtccagttctagctccaccccttcctctttatctagctccgcctttttggatctgcagcaagtcggctccggggtcccgcccttcaatgcctttccccatgctgcctccgtgtacgggcagttcacgggccaggccctcctctcagggcgagagatggtggggcccacgctgcccggatacccaccccacatccccaccagcggacagggcagctatgcctcctctgccatcgcaggcatggtggcaggaagtgaatactctggcaatgcctatggccacaccccctactcctcctacagcgaggcctggcgcttccccaactccagcttgctgagttccccatattattacagttccacatcaaggccgagtgcaccgcccaccactgccacggcctttgaccatctgtagttgccatggggacagtgggagcgactgagcaacaggaggactcagcctgggacaggccccagagagtcacacaaaggaatctttatttattacatgaaaaataaccacaagtccagcattgcggcacactccctgtgtggttaatttaatgaaccatgaaagacaggatgaccttggacaaggccaaactgtcctccaagactccttaatgaggggcaggagtcccagggaaagagaaccatgccatgctgaaaaagacaaaattgaagaagaaatgtagcccccagccggtacccaccaaaggagagaagaagcaatagccgaggaacttggggggatggcgaatggttcctgcccgggcccaaggggtgcacagggcacctccatggctccattattaacacaactctagcaattatggaccataagcacttccctccagcccacaagtcacagcctggtgccgaggctctcctcaccagccacccagggagtcacctccctcagcctcccgcctgccccacacggaggctctggctgtcctctttctccactccatttgcttggctctttctacacctccctcttgggcatgggctgagggctggagcgagtccctcagaaattccaccaggctgtcagctgacctcttttgcctgctgctgtgaaggtatagcaccaccccaggtcctcctgcagtgcggcatccccttggcagctgccgtcagccaggccagccccagggagcttaaaacagacattccacagggcctgggcccctgggaggtgaggtgtggtgtgcggcttcacccagggcagaacaaggcagaatcgcaggaaacccgcttccccttcctgacagctcctgccaagccaaatgtgcttcctgcagctcacgcccaccagctactgaagggacccaaggcaccccctgaagccagcgatagagggtccctctctgctccccagcagctcctgcccccaaggcctgactgtatatactgtaaatgaaactttgtttgggtcaagcttccttctttctaacccccagactttggcctctgagtgaaatgtctctctttgccctgtggggcttctctccttgatgcttctttctttttttaaagacaacctgccattaccacatgactcaataaaccattgctcttcatctcaggctttggggttggctggggaaggaggcatcccggggctgggctttctcccaagaacatcagagctgagtagccgacaaactcactttggggccgtgggctggaagggaccatctgatgccccagagctctggcttggccttctccctctgcctttaattcacgttgaacgctgggtacctcactcatcccaagttcttcaacactgagcaaatgcaaggatagcacagtactgagccaaccatagactccccacaaggagttgctgttgttattaacaggaagccagagaatcagcagggtgggttagtgagggatccgggaatagctgtgactggagcctgcataaacagctctgaagggagagagaagactgggctctcttgtgtgccaggcacagtatggaaggcttcatataagttaagctgaaattagccctgttttacatacagcttcattttacatatgaggaaactgaggctttgaaaaaaatgagatgtcttgtccaagatgaaaagtagtagattcaaccaagtcctcttactctaagcccaacgcttttacccaaaaccccagagtcctcatcagggatgccaaatggttctagacccagtggaggttctggagctgccactggggatttaatttcttttgatttgctaaagatttgacctgactgaatggagaggtagagtgtagtgtggccaggacaaggtgagggaggctgtagagacttagcactttaggccaaccacctccaggaaatctgggaaatgcaatgtgacagctcgggctctgcactccagggggctgtctggtgtccacatggaccttctccatgtgggacacagctggaacaagggggcaggggcctgcagctgggatgcccaggtgaatatgggcagctggacaaacaacactgggattgagtcagatagaaggggcccaaggactccagggctgggaggacagaggctgggagagagggctcttacctccttaggcctcccaaagagcggttagggatgctgccatggatggcatggcagggggaaccctcctggaagaaaatccatctcttctgaagggatctgagatgcggctggtttttcaatggcagaacttccctctgcagcgcgactccgaatccatgacatctgagagtcttcctgaccacaaacctctgggatcccgagggctccctacccaagaatcactttgagcacagcatcccaaggagcccatagagcgatcccttgcattcacagccacagcccctctggggacactctgtacccccggcagaccctttccaactcacaaccaataaaggggcttgggctgtgctttgactaaggtgaaaaaaaaaaa

SEQ ID NO: 748 - DNA, 3122 bp, Homo sapiens
ccctcccctgctctcgcaaggagaaagcgggcgacgagcgctcgcagcccgtggggctgatcccacctcccgcagggctccggtcgtgtcgctgtcggaccgcagaacgccgggacgcatttccgagctcgggcccgacccaacccgctgccattctagctacctagtggagccgcggagagactcttgaaccgtgaggctccttgatgagaaggtggagaggctgccgggctattctccgagcatcttccggccgagctctgctcctctccgtgcgcttgcggcttctccttgggctagcgcgtccgcagtccctccaagtccaggccgcagtcacccaggtggggagctagcctgaaagagacagcggaaggagtttcctggactgcgctgtcgctcaccgacccgcaccaatcaccatgcagcttgccctcggacccgccccttttagggcgtgtccccagtgagtgatagacggagccgccctgccctgctcagcccagcccacgttgctgcttagattgaaatgcagaactcaagcctctttcatcggggcacagacttccttttacttcttccttttgccctctcgcctcctcctcctgggaagaagcggaggcgccggcggtcggccgggatagcaacaggccgggccactgaggcggtgcggaaagtttctgtctgggagtgcggaactggggccgggttggtgtactgctcggagcaatggagccagccttcggggaggtgaaccagctgggaggagtgttcgtgaacgggaggccgctgcccaacgccatccggcttcgcatcgtggaactggcccaactgggcatccgaccgtgtgacatcagccgccagctacgggtctcgcacggctgcgtcagcaagatcctggcgcgatacaacgagacgggctcgatcttgccaggagccatcgggggcagcaagccccgggtcactacccccaccgtggtgaaacacatccggacctacaagcagagagaccccggcatcttcgcctgggagatccgggaccgcctgctggcggacggcgtgtgcgacaagtacaatgtgccctccgtgagctccatcagccgcattctgcgcaacaagatcggcaacttggcccagcagggtcattacgactcatacaagcagcaccagccgacgccgcagccagcgctgccctacaaccacatctactcgtaccccagccctatcacggcggcggccgccaaggtgcccacgccacccggggtgcctgccatccccggttcggtggccatgccgcgcacctggccctcctcgcactccgtcaccgacatcctgggcatccgctccatcaccgaccaagtgagcgacagctccccctaccacagccccaaggtggaggagtggagcagcctgggccgcaacaacttccccgccgccgccccgcacgcggtgaacgggttggagaagggagccctggagcaggaagccaagtacggtcaggcaccaaatggtctcccagctgtgggcagttttgtgtcagcatccagcatggctccttaccctaccccagcccaagtgtcgccttacatgacctacagtgctgctccttctggttatgttgctggacatgggtggcaacatgctgggggcacctcattgtctccccacaactgtgacattccggcatcgctggcgttcaagggaatgcaggcagccagagaaggtagtcattctgtcacggcttccgcgctctgatgggaaattccgtctccagcagcttcacccgggtctccctgtctcagcacctcctcccccaattcccaggtctcacatcccacccctcctgccctccaacccttctgccttgaaagctggctgtacggactcacatcctttgtgctaatgacacttacatatttcttgccataacttttctcttgcagaaaaactgacatgactttaggatttaaaaacaagagcaacaataagcattgaatgagacatttgtgttgcccacatactgtcttaacataacaaagaaacctacacccctcaaagggtttaaggaactttacaaactagtctttggtaaaaccacatgtgtatatttattctaaatcaacctgaacttttgaaatgtgcaattgttgagattttgcaaaatcaataaaggaaaatacttatagaaaaaattatgctacaccctctaatcaaatatggtaaccaagtaagctttaattcatcattaggaaacaaatcaataagtgacttgtttgagtgatcctttgtttaagacatgacctattttgttgaaaaatatatgtagaacccaagcaatatctgaatctagctctccctggtgttttgacttggttccaaatacaataatgtttatattttctattagtttgtaaatacggactctggatggtgcatttgtgtcttcattccataagatattcccctcccctcagccccaccccctctctatttttttctttcttttttgcaaaggtgactttctggcaacgtctttgtctctgtttggtggtgggctgctcgggctcctggacctggacttgcccccaaattttgtgtatgcagtgaaggcttcaacatctcatgaaggacactttatttctacagcagaggacacgaaaaacagataaaacaagccagtctcccattttgtacctaatcaaacaacacacatgctaagcatataaagacaagagggtggaaaatatctgaacaagaaggctctaaaggaagtcacttagaaacttaagtttaatgtgaaatgttttgcaaagatgcttaaaatgaactttgtgttaagaaaaccactgtgaaactaaattgtcctattattgttggcttacctgtgtgttcagcaatctcagccccaaataatgttgtaatttaaagaaaatggaaaattctgctctaatgaatgtaacaatggcttgctgtgaagtttacattgttgtacagaagcatgtttcgcatgtaggtaaactggtggtggtactagaaatacaatgttatttaattttaacaaattccctttattcatttctgaaattacaggacacagtttaactcataaaaaaaaaaaaaaaaaa

SEQ ID NO: 749 - DNA, 2732 bp, Homo sapiens
  modified_base (940)..(940): a, c, t, g, unknown or other
  modified_base (2650)..(2650): a, c, t, g, unknown or other
  modified_base (2656)..(2656): a, c, t, g, unknown or other
  modified_base (2690)..(2690): a, c, t, g, unknown or other
cgaaaatgaggaacaagattctcagaatgagggtagtacagatgagaagtcaagccctgccagctctcaagaagggtctccttcaggtgaccagcagttttcacctaaatccaacactgaaaaatctaaaggggaattaatgtttgatgattcttcagattcatcaccggaaaaacaggagagaaatttaaactggaccccggccgaagtcccacagttagctgcagcaaaacgcaggctgcctcagggaaaggagcctgggttgattaacttgtgtgccaatgtcccacccgtcccaggtaacattttgccccctgaggtccggggtaatttaatggctgctggacaaaacctccaaagttctgaaagatcagaaatgatagctacctggagtccagctgtacggacactgaggaatattactaataatgctgacattcagcagatgaaccggccatcaaatgtagcacatatcttacagactctttcagcacctacgaaaaatttagaacagcaggtgaatcacagccagcagggacatacaaatgccaatgcagtgctgtttagccaagtgaaagtgactccagagacacacatgctacagcagcagcagcaggcccagcagcagcagcagcagcacccggttttacaccttcagccccagcagataatgcagctccagcagcagcagcagcagcagatctctcagcaaccttacccccagcagccgccgcatccattttcacagcagcagcagcagcaacagcagccaccaccatcgcctcagcagcatcagctttttggacatgatccagcagtggagattccagaagaaggcttcttattgggatgtgtgtttgcaattgcggattatccagagcagatgtctgataagcaactgctggccacctggaaaaggataatccaggcacatggcggnactgttgacccaccttcacgagtcgatgcacgcaccttctctgtgagagtcaagtcagcagcgcgtattgcacaggcaataagagaaagaaagagatgtgttactgcacactggttaaacacagtcttaaagaagaagaaaatggtaccgccgcaccgagcccttcacttcccagtggccttcccaccaggaggaaagccatgttcacagcatattatttctgtgactggatttgttgatagtgacagagatgacctaaaattaatggcttatttggcaggtgccaaatatacgggttatctatgccgcagcaacacagtcctcatctgtaaagaaccaactggtttaaagtatgaaaaagccaaagagtggaggataccctgtgtcaacgcccagtggcttggcgacattcttctgggaaactttgaggcactgaggcagattcagtatagtcgctacacggcattcagtctgcaggatccatttgcccctacccagcatttagttttaaatcttttagatgcttggagagttcccttaaaagtgtctgcagagttgttgatgagtataagactacctcccaaactgaaacagaatgaagtagctaatgtccagccttcttcccaaagagccagaattgaagacgtaccacctcccactaaaaagctaactccagaattgaccccttttgtgcttttcactggattcgagcctgtccaggttcaacagtatattaagaagctctacattcttggtggagaggttgcggagtctgcacagaagtgcacacacctcattgccagcaaagtgactcgcaccctgaagttcctggcggcgatttctgtcgtgaagcacatagtgacgccagagtggctggaagaatgcttcaggtgtcagaagttcattgatgagcagaactacattctccgagatgctgaggcggaagtacttttctctttcagcttggaagaatccttaaaacgggcacacgtttctccactctttaaggcaaaatatttttacatcacacctggaatctgcccaagtctttccactatgaaggcaatcgtagagtgtgcaggaggaaaggtgttatccaagcagccatctttccggaagctcatggagcacaagcagaactcgagtttgtcggaaataattttaatatcctgtgaaaatgaccttcatttatgccgagaatattttgccagaggcatagatgttcacaatgcagagttcgttctgactggagtgctcactcaaacgctggactatgaatcatataagtttaactgatggcgtctaggctgccgtgcatgtcgactcctgcggtgcggggctggctgtctggctggcgaggagctgctgcgcttccttcacgtgctcttgttttccagctgctttcctgggggatcagactgtgaagcaggaagacagatataataaatatactgcatctttttaagatgtgcaattttattctgaggaaacataaattatgttttgtattatatgactttaagagcccacattaggttttatgattcatttgccaggtttttaaatgttttcacaaaactgttacgggacttcaactagaaataaaatggtgtaaataaagaccttgctatctctaaattatggatgttaaagatttgaaatgttttgtactttgattatttttatttctaaaactctgttttcttttanattganatcttgcccacattttaaataaatgtacttttgnacttaaaaaaaaaaaaaaaaaaaaaaaaaaaaaaaaaaaaaa

SEQ ID NO: 750 - DNA, 6683 bp, Homo sapiens
cttccccaccagcccttatccccaccctcaccccgcaaccccttcacgccccctccccctccccctcctcatcctcccaccatcctctaaagaggcaaagggattttttttttcttttggtcttcttttttcccccttccctgtttatcctgaaaaggatttgaagacaagcttgaaggataaaaagccttggtgcttcccaggagccgagccgaggagcagaagaggaagagccgggggctgccgtagcctttggagatggacgagcagcccaggctgatgcattcccatgctggggtcgggatggccggacaccccggcctgtcccagcacttgcaggatggggccggagggaccgagggggagggcgggaggaagcaggacattggagacattttacagcaaattatgaccatcacagaccagagtttggatgaggcgcaggccagaaaacatgctttaaactgccacagaatgaagcctgccttgtttaatgtgttgtgtgaaatcaaagaaaaaacagttttgagtatccgaggagcccaggaggaggaacccacagacccccagctgatgcggctggacaacatgctgttagcggaaggcgtggcggggcctgagaagggcggagggtcggcggcagcggcggcagcggcggcggcttctggaggggcaggttcagacaactcagtggagcattcagattacagagccaaactctcacagatcagacaaatctaccatacggagctggagaaatacgagcaggcctgcaacgagttcaccacccacgtgatgaatctcctgcgagagcaaagccggaccaggcccatctccccaaaggagattgagcggatggtcagcatcatccaccgcaagttcagctccatccagatgcagctcaagcagagcacgtgcgaggcggtgatgatcctgcgttcccgatttctggatgcgcggcggaagagacggaatttcaacaagcaagcgacagaaatcctgaatgaatatttctattcccatctcagcaacccttaccccagtgaggaagccaaagaggagttagccaagaagtgtggcatcacagtctcccaggtatcaaactggtttggaaataagcgaatccggtacaagaagaacataggtaaatttcaagaggaagccaatatttatgctgccaaaacagctgtcactgctaccaatgtgtcagcccatggaagccaagctaactcgccctcaactcccaactcggctggttcttccagttcttttaacatgtcaaactctggagatttgttcatgagcgtgcagtcactcaatggggattcttaccaaggggcccaggttggagccaacgtgcaatcacaggtggatacccttcgccatgttatcagccagacaggaggatacagtgatggactcgcagccagtcagatgtacagtccgcagggcatcagtgctaatggaggttggcaggatgctactaccccttcatcagtgacctcccctacagaaggccctggcagtgttcactctgatacctccaactgatctcccagcaatcgcatcccggctgaccctgtgccccagttggggcaggggcaggagggagggtttctctcccaacgctgaagcggtcagactggaggtcgaagcaatcagcaaacacaataagagtctccttctcttctcttctttgggatgctatttcagccaatctggacacttctttatactctcttcccttttttttctgggtagaagccacccttccctgcctccagctgtcagcctggttttcgtcatcttccctgcccctgtgcctctgtcctagactcccggggtccccgccctctctcatatcactgaaggatattttcaacaattagaggaatttaaagaggaaaaaaattacaaagaaaataataaaagtgtttgtacgttttcatgctggtggtttgaggagccaaatttacctcactcgaatccctcactccctatgttaacaggcaatccttctctgtttctcttattactctcactacctcttagcaggaatactccacattgccctattcattccaggcctccctgcttcctcttgctcttcctccctggggacagtactgattggaacactttcctcctcttccttcctagccccagctattcactggggactgtcatagctgggattctaaaggtgccacatttttcagtttcatctccactaggttggttcccgggcaggaagtcaggcagcagggaaggacacgggaacagcaggtggagaattcctacagtctttcttaccctgctagcaatagctctcagtttcagaggcacagtctttggagaccattcagcactgagaaagcaatatttagaacctattgcaaaactgggcctgagttaggcatggtgatgaatgcatcagcaaggaatagaaagttcttatcgtgaaacccttcaacctcaactatgccttcatagacacacacgttcatgcacatgtaggcacatgtaccatctcacatcttcactttcccgagatgccatatacaattacctacattaataactgtagcactatgccttttgagcccgagagagggaattagtgactctaagtgaaggtcactgacacagagaagcagtatgtgtctggggcttccaggacctgcaggcccactagcgtgcacttaccagaatggcatacacaggacctgatcatgaggaagaccaggtttccagtgtaaactactcttgttcccaccacctctggagcactcagggagccccatacagtacttacaatgtctttaatggacttgattctgtttaattttttgttttatattaggcacactgtattaattttccaaaatgttataccacactatgttcttggtcctgacctattgctctggaggaaagagttgtataagaacgtggctcatgtgaacttttgctagcttcatttgaggacctgagaatcatggggaaagggaaggtaatgttttcattgaaatcatcacagtgatttttattccctgggaacacagcgtgtactaaaaatacatgagaaaatagcatgtatatgaaagctattctcaaaagtcacctgagctcaccatcttcatagccaaccctaccagttataaagatggcagctctatcacttgattaagtgggaggtggtcaaatattttggtgcctcattttcttcatctgtgagatgggaactgttatgcctggcttactaagagtcttgtgagagactgagaagttgattttgttcatatccaatctgtaaatgcgaagtcaggggaagtaatgtccctgaaataaacgggttcatgccatctagggacaataaatggttttcttgttgtaacttctggttaatatcagtaccttgatgtcatcaccgtgatgacaaagagaagagttattgttgatcttcttggttttggtctgtctcttttcttaggataaagaaaaacttccaaactagaaaaacaggccctggttcccttagtttgcacttgaacccaatatgttgccttgtacatacttggtccctgtcacattgactgcttgggaggcttccagggagaagtatgagaccctgaggggtgagaatgggcagctagcaagaacatggaaattctgcttggcactacagtcataaatagaaaacactgtgtgtgctcaggggagcaggggatgccactgaagaaactcaagggaatgtgtatttgaaggaaatgcaaaaactaagtatttagcaaaatgaaattatgccttgatgactaaaaggcactagaaaggttgtgtctactaacttcagccctaatcagaacagatgcctagaaggagcatttttgtgacaacttcatagtgattagaatcagtggagaactccatcttagtggcaggaatataatgaaactacccacgcaagaacatggttgaatcacatttgcttgacttagggcaaagtacgaaagagagacaaaagggttctcttggaaacaagaagagtgactccagatgtggcctgaataattgccatgttaagttaatgcaaaagatcagaacagggctacatttgcacaggcagtttctctccgggccgtagttttcactgatgatcacctttcacagcattttccccaaccagcatttcacttagtcttctctatacccagcacctcccccggcacccccggcaagcccactatcacttccgacttccaacgtggcatccgtgagatctgtccacattaggcgaagcaggagaacactgagagcagcaggatgggtttggaaagagcatgcctctggaaacacagcttcctgggaattcacatgaggccagtcctacagagagcaagatgcaccccaggatttcttcattttctaatagatgtgggagtgctccattttccccgacagcgaatttcccctgagaaacgatactagaccctgggtttgcccaccttgtaactcttccttatctcctccttttcatccctaatccatcctccctctggcatggaattgacgcccgtgcagtacatttgccaagtggcaccttctttcaatttatgttttattttgctatggtggtgattctttatttgctggttgtcttttctcacacatctttctctctgtctctctctttcctgctctttgtttttctgcccagaaaaacctgacttcgataccaaaaaagatgaaactacagaaactcaaatttaaaaaaaactttaaaagaaacaaaaaaatactcaacgattctttcagctttattaacattttccattgtttcttgcgacttgtgtctcgttctttgtagtattgatgatgaacatttgataatgaatgttcttgtatattcagataaagaaaaaaaaaaccaaaaaagcggtctgaatttaatagtgtttataataaaaattttaaaaatgaccctcatagcacgcaaaacaggatggggaatttcccctcttctttctgtgacaatgcgcatcattcctgcattagtttttaacaccagactacctacattcatcatttccctcatttttcttttattttcttgcatttgtgaattagttcaagaatgctagaaaagtgtcgagttgtgcacatccatttcttgtttcacaatgtttaaaagtgacagtaattcattttgtaaactaaaaaaaaaaaaaaaaaggttggaatagtgagcataataggtacaacctaacacattattatgtttattaactttgagacccagaaataaattcttttcttttcttgattcttgctcttaaaaatacaaaaaaaaaaatgttttgttttgtgttatttttggtttgtttattggggggctttttttaattgtcaggattatgatcttgctgtttttcttcaatatgtatacaaggtgatgtgaaaagatgacttgggcagaggagtaagaacaagtaggcttgttcttctactttgcttcagaattcagttaatgccaaaagcgaagatcaagcccatgttgatgtctcgttgctcacctgcatttccagagagtgtgacactcatgcagtccctgagaaaaataaaatcagggacatacttctccttttagccttttaaaaattcaaaaacgtttagtccaagggaactttttatgctatcaggaaaggtttttgctgtttttgattctgattatcacagccaagtactttgttttatttctccctaattaataactacattccatgaggcctcttccaaccaaagaggccttttcttccaggagagtcccgcaggagatgctggtatgatgggcaccattggttaagtaaactacatgcaggaagaagtccttggggccagtctgccagctgagtcctggttttggatgaagagttaatgagatattgggccaggctcaatgctgtagttttaatgctaagaggttacgtttacttcacagagtacacctcttagtaacctctgacttaggcagctgcttaaagcaaattgcaaaactggcttgatttggaatgtttttattagaggaaaaaagaaagccatattatctggaaaaaaattcattttaaataccatcattcaacaaattatgttcagaaagtggtcagaacttaagcaagaaaagtaaagaaagaatgcagaattgtggagcaatgctttaggaaatatttctacctgaacacttgtactcttgaagtcacaacaaaataatgatgagcttttcacatcacctttatggtttcaatccctagctcaaagcttcctggaatcttttattttttgtaaacttttttttcttttgttaaaataaataaaacattcaatgtttttctccttttctctcttattacttctttcctttggcattttcaatttgaaatgctttcctttggttgttggttttattctccccctacccctccccttttcttattattcagaatataaacctgcaaagctctgctctgttttggttttgaaagtttaagcttttctgcttctgtgagagcacaggcttctgtcccttttgattccaactgaacttttgtgttctctaatgatactaacacggtgtaggttttacagtctcctaatttgtactggtaatgcatattccaaataaatag

SEQ ID NO: 751 - DNA, 3231 bp, Homo sapiens
ctctctcacacacacccccgcttgggcctcctctctctctccggctccattttctccgccgccgggggccggggtctcctgtggggggcccagccggtatcccaggtctcccttcagtgccggggtgaacccccgggggagccgggagccgggggcagacgggcgggggttggggcggagggagcagcggccccagcgagtttggggggagaagtaaccaggcggggggaggggcggagcagggagggggcctcagggcccccccccagctatggacgaacggctactggggccgccccctccaggcgggggccgggggggcctgggattggtgagtggggagcctgggggccctggcgagcctcccggtggcggagaccccggtgggggtagcgggggggtcccgggaggccgagggaagcaagacatcggggacattctgcagcagataatgaccatcaccgaccagagcctggacgaggcccaggccaagaaacacgccctaaactgccaccgaatgaagcctgctctctttagcgtcctgtgtgaaatcaaggagaaaactggcctcagcattcggagctcccaggaggaggagccggtggacccacagctgatgcgcttggacaacatgcttctggcagagggtgtggctgggcccgagaaagggggcggctcagcagcagcagctgcagccgctgcagcctctggtggtggtgtgtcccctgacaactccatcgaacactcggactatcgcagcaaacttgcccagatccgtcacatataccactcggagctggagaagtatgagcaggcatgtaatgagttcacgacccatgtcatgaacctgctgagggagcagagccgcaccaggcccgtggcccccaaagagatggaacgcatggtgagcatcatccatcgaaagttcagcgccatccagatgcagctgaagcagagcacctgcgaggctgtgatgatcctgcgctcccgtttcctggatgccagacgaaagcgccgtaacttcagcaaacaggccactgaggtcctaaatgagtatttctactcccacctgagtaacccatatcctagtgaggaggccaaggaggagcttgccaagaagtgtggcatcaccgtgtctcaggtctccaactggtttggcaacaagaggattcgctataagaaaaacatcggaaagttccaagaggaggcaaacatctatgctgtcaagaccgccgtgtcagtcacccaggggggccacagccgcaccagctccccgacacccccttcctctgcaggctctggcggctctttcaatctctcaggatctggagacatgtttctggggatgcctgggctcaacggagattcctattctgcttcccaggtggaatcactccgacactcgatggggccagggggctatggggataacctcgggggaggccagatgtacagcccacgggaaatgagggcaaatggcagctggcaagaggctgtgaccccctcttcagtgacatccccaacggagggaccagggagtgttcactctgatacctccaactgatcttgcccctcagggtcacaggggtgggggctctcacaaggcgacttgaagaggacgcaggcttccagaggacaaaccccaatacaggagaagcacaagacagagaagggccaatggggtcatcccctccctaacgagactctctgtgctgggggtgctaattacatggcaggaagaatggggcctctaaggggagtgtggggtctgtctctcccttttttccatctttttcctctctcgctttctttcttacacagaaacatacacataccgagaaacctatttctcagacccctttttctcctctgtctttctctctccctctcccacacctcacacacacatactcccacttgcaactattctgtttctctcctgggctcccccactttcccttccccaccccacttgtatgctctggaatctgtggagacgccagccctgcccaatcagagatgccaaaaatggggacatgacttctggacagaggacatgggccacgcccccatgcatccccacccccgcccctccggacggcttacttacctcatacgcagctcatcttaaaccaatagaatcgctcggtggacgagagtgtctgactcagatatctacctcggagggagtttctgctactttagggaattattgactgggctttggggttgaacttttttttttttaaagaaagaaaaagaaaccctgggatccatctgttttttttgttgttgttgttgtttttgttgttgttggtggtggtggtggtggtggttcttaatttttaatttagtttggggaagtagcttgtttttttttttataaatatgttgatttcttgtctttttttttttttatttcttactttcccatattaggggtgatagccaaaggggttctggtaagagaaagggggacaaacagaactggtaaagaggcccccctggctccaggcctgtccatcaggaagtaaattttacagggcaccaagctttgccccctaaaatcccttaggtgttctttgttcatgcaggcaggtttctgccgcatttgatgtggaggcagtgaagggcttgccctgctggcctctcatcccccttcttcccacaacccttgggcagggctggactcagtaattttgaggaaattgaagatgccatcttcccctgtgagtgacatgtctttaattttttaaaaaactactatttgaaaattggagggggaagaatgggaagggagttattgccaaatatgttaaatatgggttggggtgcttgtatatgtatcttcctcaatttccccataaatgaggtatctttttgtcacaccaaaatcaaggggtagggagagggaggaggttgcaaaaagccagatgtgggggaaaagtaacatcaacactgtcccatcctcagccctgaactagctaccatctgatcccctcagacattctcaggattttacaagactgtcagagtggggaacccctcccattaaagatccgggcaggactggggacaggttggaagtgtgatgggtgggggggtgggaggcatgggccgggggcagttctctcctcacttgtaaacttgtgtagtttcacagaaaaaaaacaaaatgcagttttaaataaagaaatttcttttttccctgggaaaaaaaaaaaaaaaaaa

SEQ ID NO: 752 - DNA, 1894 bp, Homo sapiens
gtctgacttcctcccagcacattcctgcactctgccgtgtccacactgccccacagacccagtcctccaagcctgctgccagctccctgcaagcccctcaggttgggccttgccacggtgccagcaggcagccctgggctgggggtaggggactccctacaggcacgcagccctgagacctcagagggccaccccttgagggtggccaggcccccagtggccaacctgagtgctgcctctgccaccagccctgctggcccctggttccgctggccccccagatgcctggctgagacacgccagtggcctcagctgcccacacctcttcccggcccctgaagttggcactgcagcagacagctccctgggcaccaggcagctaacagacacagccgccagcccaaacagcagcggcatgggcagcgccagcccgggtctgagcagcgtatcccccagccacctcctgctgccccccgacacggtgtcgcggacaggcttggagaaggcggcagcgggggcagtgggtctcgagagacgggactggagtcccagtccacccgccacgcccgagcagggcctgtccgccttctacctctcctactttgacatgctgtaccctgaggacagcagctgggcagccaaggcccctggggccagcagtcgggaggagccacctgaggagcctgagcagtgcccggtcattgacagccaagccccagcgggcagcctggacttggtgcccggcgggctgaccttggaggagcactcgctggagcaggtgcagtccatggtggtgggcgaagtgctcaaggacatcgagacggcctgcaagctgctcaacatcaccgcagatcccatggactggagccccagcaatgtgcagaagtggctcctgtggacagagcaccaataccggctgccccccatgggcaaggccttccaggagctggcgggcaaggagctgtgcgccatgtcggaggagcagttccgccagcgctcgcccctgggtggggatgtgctgcacgcccacctggacatctggaagtcagcggcctggatgaaagagcggacttcacctggggcgattcactactgtgcctcgaccagtgaggagagctggaccgacagcgaggtggactcatcatgctccgggcagcccatccacctgtggcagttcctcaaggagttgctactcaagccccacagctatggccgcttcattaggtggctcaacaaggagaagggcatcttcaaaattgaggactcagcccaggtggcccggctgtggggcatccgcaagaaccgtcccgccatgaactacgacaagctgagccgctccatccgccagtattacaagaagggcatcatccggaagccagacatctcccagcgcctcgtctaccagttcgtgcaccccatctgagtgcctggcccagggcctgaaacccgccctcaggggcctctctcctgcctgccctgcctcagccaggccctgagatgggggaaaacgggcagtctgctctgctgctctgaccttccagagcccaaggtcagggaggggcaaccaactgccccagggggatatgggtcctctggggccttcgggaccatggggcaggggtgcttcctcctcaggcccagctgctcccctggaggacagagggagacagggctgctccccaacacctgcctctgaccccagcatttccagagcagagcctacagaagggcagtgactcgacaaaggccacaggcagtccaggcctctctctgctccatccccctgcctcccattctgcaccacacctggcatggtgcagggagacatctgcacccctgagttgggcagccaggagtgcccccgggaatggataataaagatactagagaactg

SEQ ID NO: 753 - DNA, 1727 bp, Homo sapiens
acaacaaagatggcggcggcgactgtgacggtgacgaagacggcggcggcggcgacggcatttaacaaggcggtgtggtttactccatgcagttgtcaggagacctctgtatggcttttcaattttagttgaaattctctctccatggccttttggagtcccttgctgtatctccgaagtaaatttcaattactctacatttcatcaatgttggagtggcaagaaaaaggaggaacagatttggggtgaaaagttttgttttctaggtctaacaaactgtaaatgttaaaaaagcaaagatgggtgaaaaaaaaccagagcctttggacttcgtgaaagattttcaggaatacctgactcagcagacccatcacgtgaacatgatttctggatcagttagtggggacaaagaagcagaggctcttcagggagctggaacagatggtgatcaaaatggacttgatcacccatctgttgaagtttccttggatgaaaactcaggaatgttagtagacgggtttgaaaggacctttgatgggaagcttaagtgtcggtactgcaactatgccagcaaaggaacagcccggcttattgaacacatcagaatccacacaggtgaaaaacctcatcgatgtcatctttgtccatttgcatctgcttatgagcgtcatctggaagcccatatgcgttctcatactggagaaaaaccatacaaatgtgaattatgttccttccgctgcagtgatcgaagtaacttgtcccatcatcgaaggcgcaagcataaaatggtaccaattaaaggtactaggtcttccttaagcagcaagaaaatgtggggggttttacagaagaaaacaagcaatctgggctatagcagaagagcactaatcaacttaagtccaccttccatggtggttcagaaaccagactaccttaacgattttacccacgaaatcccaaatatccagactgactcctatgaaagtatggcaaaaaccacaccaactggtggccttccaagggacccccaagaactcatggttgataaccctttgaatcagctctcgactctagcagggcagttgtccagtctgccacccgaaaaccaaaaccctgcatcccctgatgtagttccctgccctgatgaaaagcctttcatgattcagcagccctctacccaagcagtagtttctgccgtatcagcaagtattcctcagagctcctctcccacaagcccagaacctcggccatcccatagtcaaaggaactatagtccagtggcaggtccaagcagtgagccaagtgcccacacgagcactcccagcataggaaacagccagccaagcaccccagccccagccctgccggtccaggaccctcagcttctgcaccactgccagcactgtgatatgtactttgcagacaacatcctttacactattcatatgggatgtcatgggtatgaaaatccttttcagtgtaatatatgtggatgcaaatgtaaaaacaagtatgattttgcctgtcattttgcaagagggcaacataaccaacattgattgaaaatagtcatattttacttagttttgctgtttttgtggtttggttttttttgttttttgttttggtcatccctaataaagtgtctgctaattcaaaaaaaaaaaaaaaaaaaaaaaaaaaaaaaaaaaaaaaaaaaaaaaaaaaaaaaaaaaaaaaaaaaaaaa

SEQ ID NO: 754 - DNA, 4717 bp, Homo sapiens
attatgcaacccgcctccccgcccgcccggtggagcttccactcggctgcgggctggagcggcggcgggcaggcgtgcggaggacactcctgcgaccaggtactggctgtgatcgaacttctcaaccctcagagacttagatcttccacctcactccctcagccaagcctccaggccccctcgtgcatccgtggtggcctctctgccttctctgttctgttctccccatggcccagacatgagtggccccctagaaggggctgatgggggaggggaccccaggcctggggaatcattttgtcctgggggcgtcccatcccctgggcccccacagcaccggccttgcccaggccccagcctggccgatgacaccgatgccaacagcaatggttcaagtggcaatgagtccaacgggcatgagtctagaggcgcatctcagcggagctcacacagctcctcctcaggcaacggcaaggactcagccctgctggagaccactgagagcagcaagagcacaaactctcagagcccatccccacccagcagttccattgcctacagcctcctgagtgccagctcagagcaggacaacccgtccaccagtggctgcagcagtgaacagtcagcccgggcaaggactcagaaggaactcatgacagcacttcgagagctcaagcttcgactgccgccagagcgccggggcaagggccgctctgggaccctggccacgctgcagtacgcactggcctgtgtcaagcaggtgcaggccaaccaggaatactaccagcagtggagcctggaggagggcgagccttgctccatggacatgtccacctataccctggaggagctggagcacatcacgtctgagtacacacttcagaaccaggataccttctcagtggctgtctccttcctgacgggccgaatcgtctacatttcggagcaggcagccgtcctgctgcgttgcaagcgggacgtgttccggggtacccgcttctctgagctcctggctccccaggatgtgggagtcttctatggttccactgctccatctcgcctgcccacctggggcacaggggcctcagcaggttcaggcctcagggactttacccaggagaagtccgtcttctgccgtatcagaggaggtcctgaccgggatccagggcctcggtaccagccattccgcctaaccccgtatgtgaccaagatccgggtctcagatggggcccctgcacagccgtgctgcctgctgattgcagagcgcatccattcgggttacgaagctccccggataccccctgacaagaggattttcactacgcggcacacacccagctgcctcttccaggatgtggatgaaagggctgcccccctgctgggctacctgccccaggacctcctgggggccccagtgctcctgttcctgcatcctgaggaccgacccctcatgctggctatccacaagaagattctgcagttggcgggccagccctttgaccactcccctatccgcttctgtgcccgcaacggggagtatgtcaccatggacaccagctgggctggctttgtgcacccctggagccgcaaggtagccttcgtgttgggccgccacaaagtacgcacggcccccctgaatgaggacgtgttcactcccccggcccccagcccagctccctccctggacactgatatccaggagctgtcagagcagatccaccggctgctgctgcagcccgtccacagccccagccccacgggactctgtggagtcggcgccgtgacatccccaggccctctccacagccctgggtcctccagtgatagcaacgggggtgatgcagaggggcctgggcctcctgcgccagtgactttccagcagatctgtaaggatgtgcatctggtgaagcaccagggccagcagctttttattgagtctcgggcccggcctcagtcccggccccgcctccctgctacaggcacgttcaaggccaaggcccttccctgccaatccccagacccagagctggaggcgggttctgctcccgtccaggccccactagccttggtccctgaggaggccgagaggaaagaagcctccagctgctcctaccagcagatcaactgcctggacagcatcctcaggtacctggagagctgcaacctccccagcaccactaagcgtaaatgtgcctcctcctcctcctataccacctcctcagcctctgacgacgacaggcagaggacaggtccagtctctgtggggaccaagaaagatccgccgtcagcagcgctgtctggggagggggccaccccacggaaggagccagtggtgggaggcaccctgagcccgctcgccctggccaataaggcggagagtgtggtgtccgtcaccagtcagtgtagcttcagctccaccatcgtccatgtgggagacaagaagcccccggagtcggacatcatcatgatggaggacctgcctggcctagccccaggcccagcccccagcccagcccccagccccacagtagcccctgacccagccccagacgcctaccgtccagtggggctgaccaaggccgtgctgtccctgcacacacagaaggaagagcaagccttcctcagccgcttccgagacctgggcaggctgcgtggactcgacagctcttccacagctccctcagcccttggcgagcgaggctgccaccacggccccgcacccccaagccgccgacaccactgccgatccaaagccaagcgctcacgccaccaccagaaccctcgggctgaagcgccctgctatgtctcacacccctcacccgtgccaccctccaccccctggcccaccccaccagccactacccccttcccagcggttgtccagccctaccctctcccagtgttctctcctcgaggaggcccccagcctcttccccctgctcccacatctgtgcccccagctgctttccccgcccctttggtgaccccaatggtggccttggtgctccctaactatctgttcccaaccccatccagctatccttatggggcactccagacccctgctgaagggcctcccactcctgcctcgcactccccttctccatccttgcccgccctcgccccgagtcctcctcaccgcccggactctccactgttcaactcgagatgcagctctccactccagctcaatctgctgcagctggaggagctcccccgtgctgagggggctgctgttgcaggaggccctgggagcagtgccgggcccccacctcccagtgcggaggctgctgagccagaggccagactggcggaggtcactgagtcctccaatcaggacgcactttccggctccagtgacctgctcgaacttctgctgcaagaggactcgcgctccggcacaggctccgcagcctcgggctccttgggctctggcttgggctctgggtctggttcaggctcccatgaagggggcagcacctcagccagcatcactcgcagcagccagagcagccacacaagcaaatactttggcagcatcgactcttccgaggctgaggctggggctgctcggggcggggctgagcctggggaccaggtgattaagtacgtgctccaggatcccatttggctgctcatggccaatgctgaccagcgcgtcatgatgacctaccaggtgccctccagggacatgacctctgtgctgaagcaggatcgggagcggctccgagccatgcagaagcagcagcctcggttttctgaggaccagcggcgggaactgggtgctgtgcactcctgggtccggaagggccaactgcctcgggctcttgatgtgatggcctgtgtggactgtgggagcagcacccaagatcctggtcaccctgatgacccactcttctcagagctggatggactggggctggagcccatggaagagggtggaggcgagcagggcagcagcggtggcggcagtggtgagggagagggctgcgaggaggcccaaggcggggccaaggcttcaagctctcaggacttggctatggaggaggaggaagaaggcaggagctcatccagtccagccttacctacagcaggaaactgcaccagctagactccattctgggaccatctccaggagtccatgagaggctttcttctcctatgtcccaattctcagaactcagatgtggctagaccaaccagtgggaaactgccccagcttctcccaccatagggggccggacccccatcaccagcctaggatccaggggctgcctctggcctcttagggagcagagagcagaactccgcagcccagcccagaggagtgtcacctcccacctttggagaggaatccttccctcccctggacaaagttgctgacaagctgctgaagtggcctctccatattccagctgagcctgaatctgactcttgagggttggggctgcacttatttattgcggggagacagctctctctcccacctcctccccagatgggaggagagcctgaggcccaagcaggacccgggggttccagcccctagctgctctggagtgggggaggttggtggaccatggagtccctggtgctgcccctcaggtgggacccaggcgttctcagctgtaccctctgccgatggcatttgtgtttttgatatttgtgtctgttactacttttttaatacaaaaagataaaaacgcccaaaaaaaaa

SEQ ID NO: 755 - DNA, 1337 bp, Homo sapiens
gtggtcgagccgcgcgcagggtgcgctcgtttgaactgcggtgacaccgagggttggggactcgaacccccgcttcgcagctcaggagcctgaggtccgaaagcttcgttccagagcccagcatgaatggatacgcggaatttccgcccagccccagtaaccccaccaaggagcccgtggagccccagcccagccaggtcccactgcaggaagatgtggacatgagcagtggctccagtggacatgagaccaacgaaaactgctccacggggcgggactcgcagggcagtgactgtgacgacagtgggaaggagctggggatgctggtggagccaccggatgcccgccagagtccagatacctttagcctgatgatggcaaaatctgaacacaacccatctacaagtggctgcagtagcgaccagtcttcgaaagtggacacacacaaagaactgataaaaacactaaaggagctgaaggtccacctccctgcagacaagaaggccaagggcaaggccagtacgctggccaccttgaagtacgccctcaggagcgtgaagcaggtgaaagccaatgaagagtattaccagctgctgatgtccagcgagggtcacccctgtggagcagacgtgccctcctacaccgtggaggagatggagagcgttacctctgagcacattgtgaagaatgccgatatgtttgcggtggccgtgtccctggtgtctgggaagatcctgtacatctctgaccaggttgcatccatatttcactgtaaaagagatgccttcagcgatgccaagtttgtggagttcctggcgcctcacgatgtgggcgtgttccacagtttcacctccccgtacaagcttcccttgtggagcatgtgcagtggagcagattcttttactcaagaatgcatggaggagaaatctttcttttgccgtgtcagtgtccggaaaagccacgagaatgaaatccgctaccaccccttccgcatgacgccctacctggtcaaggtgcgggaccaacaaggtgctgagagtcagctttgctgccttctgctggcagagagagtgcactctggttatgaagcccctagaattcctcctgaaaagagaatttttacaaccacccatacaccaaattgtttgttccaggatgtggatgaaagtcctgcagtcaggcgggcagcctttcgactattctcccattcggtttcgcgcccggaacggagagtacatcacgttggacaccagctggtccagcttcatcaacccatggagcaggaaaatctccttcatcattgggaggcacaaagtcagggtgggccctttgaatga

SEQ ID NO: 756 - DNA, 6203 bp, Homo sapiens
ggaaaagctcctcggagatgagcgtgaccccctggctcgtggtggccgcctgttctcactaacgccatggcggggaccggagtgagaaaccggtgtctgtcactgactgcaaagtgagcgagaagcaggctgcgggccgtcccagcacgacgtggagccccgcggagacctcgagatgccccgcggggaagctcctggccccgggagacggggggctaaggacgaggccctgggcgaagaatcgggggagcggtggagccccgagttccatctgcagaggaaattggcggacagcagccacagtgaacagcaagatcgaaacagagtttctgaagaacttatcatggttgtccaagaaatgaaaaaatacttcccctcggagagacgcaataaaccaagcactctagatgccctcaactatgctctccgctgtgtccacagcgttcaagcaaacagtgagtttttccagattctcagtcagaatggagcacctcaggcagatgtgagcatgtacagtcttgaggagctggccactatcgcttcagaacacacttccaaaaacacagatacctttgtggcagtattttcatttctgtctggaaggttagtgcacatttctgaacaggctgctttgatcctgaatcgtaagaaagatgtcctggcgtcttctcactttgttgacctgcttgcacctcaagacatgagggtattctacgcgcacactgccagagctcagcttcctttctggaacaactggacccaaagagctgcacggtatgaatgtgctccggtgaaaccttttttctgcaggatccgtggaggtgaagacagaaagcaagagaagtgtcactccccattccggatcatcccctatctgattcatgtacatcaccctgcccagccagaattggaatcggaaccttgctgtctcactgtggttgaaaagattcactctggttatgaagctcctcggatcccagtgaataaaagaatcttcaccaccacacacaccccagggtgtgtttttcttgaagtagatgaaaaagcagtgcctttgctgggttacctacctcaggacctgattggaacatcgatcctaagctacctgcaccctgaagatcgttctctgatggttgccatacaccaaaaagttttgaagtatgcagggcatcctccctttgaacattctcccattcgattttgtactcaaaacggagactacatcatactggattccagttggtccagctttgtgaatccctggagccggaagatttctttcatcattggtcggcataaagttcgaacgagcccactaaatgaggatgtttttgctaccaaaattaaaaagatgaacgataatgacaaagacataacagaattacaagaacaaatttacaaacttctcttacagccagttcacgtgagcgtgtccagcggctacgggagcctggggagcagcgggtcgcaggagcagcttgtcagcatcgcctcctccagtgaggccagtgggcaccgtgtggaggagacgaaggcggagcagatgaccttgcagcaggtctatgccagtgtgaacaaaattaaaaatctgggtcagcagctctacattgagtcaatgaccaaatcatcattcaagccagtgacggggacacgcacagaaccgaatggtggtggtgaatgtaagacctttacttccttccaccaaacactgaaaaacaatagtgtgtacactgagccctgtgaggatttgaggaacgatgagcacagcccatcctatcaacagatcaactgtatcgacagtgtcatcagatacctgaagagctacaacattccagctttgaaaagaaagtgtatctcctgtacaaatacaacttcttcctcctcagaagaagacaaacagaaccacaaggcagatgatgtccaagccttacaagctggtttgcaaatcccagccatacctaaatcagaaatgccaacaaatggacggtccatagacacaggaggaggagctccacagatcctgtccacggcgatgctgagcttggggtcgggcataagccaatgcggttacagcagcaccattgtccatgtcccacccccagagacagccagggatgctaccctcttctgtgagccctggaccctgaacatgcagccagcccctttgacctcggaagaatttaaacacgtggggctcacagcggctgttctgtcagcgcacacccagaaggaagagcagaattatgttgataaattccgagaaaagatcctgtcatcaccctacagctcctatcttcagcaagaaagcaggagcaaagctaaatattcatattttcaaggagattctacttccaagcagacgcggtcggccggctgcaggaaagggaagcacaagcggaagaagctgccggagccgccagacagcagcagctcgaacaccggctctggtccccgcaggggagcgcatcagaacgcacagccctgctgcccctccgcggcctcctctccgcacacctcgagcccgaccttcccacctgccgccatggtgcccagccaggccccttacctcgtcccagcttttcccctcccagccgcgacctcacccggaagagaatacgcagcccccggaactgcaccggaaggcctgcatgggctgcccttgtccgagggcttgcagccttacccagctttcccttttccttacttggatacttttatgaccgttttcctgcctgacccccctgtctgtcctctgttgtcgccatcgtttttgccatgtccattcctgggggcgacagcctcttctgcgatatcaccctcaatgtcgtcagcaatgagtccaactctggacccacccccttcagtcaccagccaaaggagagaggaggaaaagtgggaggcacaaagcgaggggcacccgttcattacttcgagaagcagctcacccttgcagttaaacttacttcaggaagagatgcccagaccctctgaatctccagatcagatgagaaggaacacgtgcccacaaactgagtattgtgttacaggcaacaatggcagtgagagcagtcctgctactaccggtgcactgtccacggggtcacctcccagggagaatccatcccatcctactgccagcgctctgtccacaggatcgcctcccatgaagaatccatcccatcctactgccagcgctctgtccacaggatcgcctcccatgaagaatccatcccatcctactgccagcacactgtccatgggattgcctcccagcaggactccatcccatcctactgccactgttctgtccacggggtcacctcccagcgaatccccatccagaactggttcagcagcatcaggaagcagcgacagcagtatataccttactagtagtgtttattcttctaaaatctcccaaaatgggcagcaatctcaggacgtacagaaaaaagaaacatttcctaatgtcgccgaagagcccatctggagaatgatacggcagacacctgagcgcattctcatgacataccaggtacctgagagggttaaagaagttgtactaaaagaagacctggaaaagctagaaagtatgaggcagcagcagccccagttttctcatgggcaaaaggaggagctggctaaggtgtataattggattcaaagccagactgtcactcaagaaatcgacattcaagcctgtgtcacttgtgaaaatgaagattcagctgatggtgcggccacatcctgtggtcaggttctggtagaagacagctgttgagtgactgtgaggatgaaccttcataccctttccaagacgtgttacacagacagacctttttaagtcctggacttttaaatgaccatgaagttatcattgaatgttaagattttttcttcttgattttttaatacacgtaatctttttgaagcagacattgtatacagaatcttacttctctttgttcctgatatattaaaatggccagttaggctctttttgtagttgaattgtcttctaaagagattggatggcctctaaagaggtatgtgtatctttatttcagatgtcacccagagtaaattataattagaagtatagctagaatgagccccaaaccttagcctcatttattttgttctgttacataagtcattttccccttagagtgcttgaagaaatgccacctacaggttgtgtacttttcataatggtttccatgaatgtagtacgttcatacaggcttcattcaacctggcgttcccctccataattaagatgaaacattccggttttctcacaacacattagcacatactgtccattagcatatctgggataaccaggttttgggggttgagttttggccttcatccttgtagatccctttcctattgatttcccaccttccagtgaaattctgaaagtcttatcttaaaaatcgatccgcttaccatgggcctattcttgtaagtttcagttagcatttgcatgtgtaatattaaaatgaaagagcttcttacccagtgctgttgcccttttgagtatttttgtttttaaaataatgattgtaaaatgttttacaagtaatgtaaaagctagtatcattcttacatacttctgtgtttaaattttcattcttaccaaaacagttaactctttctttccaatcaatttatacaaaagaggtcgctccagccctaccacaggtctgactggcactgccttttgtttgcccttgaacagggcagtgttgtggggactgcaaaagagaaaacgtccaggcgagcccagttgtcctcgcccacagggtcctgcaggctccatcagtcaccgctttctatggcgtttgtagttgtgtcttttaagaagtgagtgtgattgtttacttgataaatcagctcactctctggtgctttttagagaagtccctgattccttcttaaacttggaatgatagatgaaattcacacccctgcagatcagaaaaaacaaatagaagaaaatgagggttacagtaacctgttgtctttatataacttgcaacaaactaatttatttttttttcctttttttgtttttggttttttatggttttttaaggaaaatacttttctcctttgaagttttacagctttttgtaaatgcgtcctgataatgattaggaaaatcgaccttttcatccatgatgaccatcctcatagctcagatctcctttcaaagtagtggctttctggatggtaattccatcttaaggtgtcagaactattttcaaatgctgcctttgacagttcttggaattttctgatattaagcagttccatgcaaatattcgtgttttataaatagctctcatagtctgctccatcttgatagttaagtgatttctgaagcgtttgtgtgtgtgttgatcaggttgtgtgatatttttgcttgatagagaatcaaatttgaaacaattaaccagccagtagattgtctgtcagtgaccttctgtagtaataaagtttttgccactgtaaataaaaacagtatccgtagctatcaggatcattgcgcactcatatatgctaagccttctgttctctaatagaagcctttcttttccattgtttctggatatttgtattatccaaatgtgcttatttctttgccttagcacacgttttatggagtacttgttatactaggtttgatttgaaactggtgcttgtcgcagaactgtcagagcatgaggagcgctcctcctgtgggtggacgcattcacgcactcccaggttgcacctgctgctggcggtgagcagggggttcagcagcttgaccgatgccccccgagggggctctccccagcttaaactttgttgtttaaatttgttaactttttatattaatgactattgaaagtggtaataaaaatttatattataggcttcaatgttttcatgaatgttacccaaaaagctgtgttttctttggtcagaggtcaaaatttatgaaaaacaaaatgctgtatgaatggaaatcattttgcaattgagtgacacttcattgtaattcacagtgtaaatttaatccaaactgaaattttgtttcaactgaatttgtaattaactctgaatttgtttttaatcattagtaatatttcagttgggtatctttttaagtaaaaacaacaaataaactctgtacatgtaaaacgtga

SEQ ID NO: 757 - DNA, 743 bp, Homo sapiens
gaggatcatagagctgtctggcgcagcgaggcctcccggcgccaccgagacgcgcagaggacggctagagcgttgctcgccgagagacttcctcttcgttaagtcggccttcccaacatggcgcagtctattaacatcacggagctgaatctgccgcagctagaaatgctcaagaaccagctggaccaggaagtggagttcttgtccacgtccattgctcagctcaaagtggtacagaccaagtatgtggaagccaaggactgtctgaacgtgctgaacaagagcaacgaggggaaagaattactcgtcccactgacgagttctatgtatgtccctgggaagctgcatgatgtggaacacgtgctcatcgatgtgggaactgggtactatgtagagaagacagctgaggatgccaaggacttcttcaagaggaagatagattttctaaccaagcagatggagaaaatccaaccagctcttcaggagaagcacgccatgaaacaggccgtcatggaaatgatgagtcagaagattcagcagctcacagccctgggggcagctcaggctactgctaaggcctgagagtttttgcagaaatggggcagagggacaccctttgggcgtggcttcctggtgatgggaagggtcttgtgttttaatgccaataaatgtgccagctgggcagaaaaaaaaaaaaaaaaaaaaaaaaaaaaaaaaaaaaaaaaaaaaaaaaaaaaaaaaaa

SEQ ID NO: 758 - DNA, 13037 bp, Homo sapiens
agtccacagctgtcactaatcggggtaagccttgttgtatttgtgcgtgtgggtggcattctcaatgagaactagcttcacttgtcatttgagtgaaatctacaacccgaggcggctagtgctcccgcactactgggatctgagatcttcggagatgactgtcgcccgcagtacggagccagcagaagtccgacccttcctgggaatgggctgtaccgagaggtccgactagccccagggttttagtgagggggcagtggaactcagcgagggactgagagcttcacagcatgcacgagtttgatgccagagaaaaagtcgggagataaaggagccgcgtgtcactaaattgccgtcgcagccgcagccactcaagtgccggacttgtgagtactctgcgtctccagtcctcggacagaagttggagaactctcttggagaactccccgagttaggagacgagatctcctaacaattactactttttcttgcgctccccacttgccgctcgctgggacaaacgacagccacagttcccctgacgacaggatggaggccaagggcaggagctgaccagcgccgccctcccccgcccccgacccaggaggtggagatccctccggtccagccacattcaacacccactttctcctccctctgcccctatattcccgaaaccccctcctccttcccttttccctcctcctggagacgggggaggagaaaaggggagtccagtcgtcatgactgagctgaaggcaaagggtccccgggctccccacgtggcgggcggcccgccctcccccgaggtcggatccccactgctgtgtcgcccagccgcaggtccgttcccggggagccagacctcggacaccttgcctgaagtttcggccatacctatctccctggacgggctactcttccctcggccctgccagggacaggacccctccgacgaaaagacgcaggaccagcagtcgctgtcggacgtggagggcgcatattccagagctgaagctacaaggggtgctggaggcagcagttctagtcccccagaaaaggacagcggactgctggacagtgtcttggacactctgttggcgccctcaggtcccgggcagagccaacccagccctcccgcctgcgaggtcaccagctcttggtgcctgtttggccccgaacttcccgaagatccaccggctgcccccgccacccagcgggtgttgtccccgctcatgagccggtccgggtgcaaggttggagacagctccgggacggcagctgcccataaagtgctgccccggggcctgtcaccagcccggcagctgctgctcccggcctctgagagccctcactggtccggggccccagtgaagccgtctccgcaggccgctgcggtggaggttgaggaggaggatggctctgagtccgaggagtctgcgggtccgcttctgaagggcaaacctcgggctctgggtggcgcggcggctggaggaggagccgcggctgtcccgccgggggcggcagcaggaggcgtcgccctggtccccaaggaagattcccgcttctcagcgcccagggtcgccctggtggagcaggacgcgccgatggcgcccgggcgctccccgctggccaccacggtgatggatttcatccacgtgcctatcctgcctctcaatcacgccttattggcagcccgcactcggcagctgctggaagacgaaagttacgacggcggggccggggctgccagcgcctttgccccgccgcggagttcaccctgtgcctcgtccaccccggtcgctgtaggcgacttccccgactgcgcgtacccgcccgacgccgagcccaaggacgacgcgtaccctctctatagcgacttccagccgcccgctctaaagataaaggaggaggaggaaggcgcggaggcctccgcgcgctccccgcgttcctaccttgtggccggtgccaaccccgcagccttcccggatttcccgttggggccaccgcccccgctgccgccgcgagcgaccccatccagacccggggaagcggcggtgacggccgcacccgccagtgcctcagtctcgtctgcgtcctcctcggggtcgaccctggagtgcatcctgtacaaagcggagggcgcgccgccccagcagggcccgttcgcgccgccgccctgcaaggcgccgggcgcgagcggctgcctgctcccgcgggacggcctgccctccacctccgcctctgccgccgccgccggggcggcccccgcgctctaccctgcactcggcctcaacgggctcccgcagctcggctaccaggccgccgtgctcaaggagggcctgccgcaggtctacccgccctatctcaactacctgaggccggattcagaagccagccagagcccacaatacagcttcgagtcattacctcagaagatttgtttaatctgtggggatgaagcatcaggctgtcattatggtgtccttacctgtgggagctgtaaggtcttctttaagagggcaatggaagggcagcacaactacttatgtgctggaagaaatgactgcatcgttgataaaatccgcagaaaaaactgcccagcatgtcgccttagaaagtgctgtcaggctggcatggtccttggaggtcgaaaatttaaaaagttcaataaagtcagagttgtgagagcactggatgctgttgctctcccacagccagtgggcgttccaaatgaaagccaagccctaagccagagattcactttttcaccaggtcaagacatacagttgattccaccactgatcaacctgttaatgagcattgaaccagatgtgatctatgcaggacatgacaacacaaaacctgacacctccagttctttgctgacaagtcttaatcaactaggcgagaggcaacttctttcagtagtcaagtggtctaaatcattgccaggttttcgaaacttacatattgatgaccagataactctcattcagtattcttggatgagcttaatggtgtttggtctaggatggagatcctacaaacacgtcagtgggcagatgctgtattttgcacctgatctaatactaaatgaacagcggatgaaagaatcatcattctattcattatgccttaccatgtggcagatcccacaggagtttgtcaagcttcaagttagccaagaagagttcctctgtatgaaagtattgttacttcttaatacaattcctttggaagggctacgaagtcaaacccagtttgaggagatgaggtcaagctacattagagagctcatcaaggcaattggtttgaggcaaaaaggagttgtgtcgagctcacagcgtttctatcaacttacaaaacttcttgataacttgcatgatcttgtcaaacaacttcatctgtactgcttgaatacatttatccagtcccgggcactgagtgttgaatttccagaaatgatgtctgaagttattgctgcacaattacccaagatattggcagggatggtgaaaccccttctctttcataaaaagtgaatgtcatctttttcttttaaagaattaaattttgtggtatgtctttttgttttggtcaggattatgaggtcttgagtttttataatgttcttctgaaagccttacatttataacatcatagtgtgtaaatttaaaagaaaaattgtgaggttctaattattttcttttataaagtataattagaatgtttaactgttttgtttacccatattttcttgaagaatttacaagattgaaaaagtactaaaattgttaaagtaaactatcttatccatattatttcataccatgtaggtgaggatttttaacttttgcatctaacaaatcatcgacttaagagaaaaaatcttacatgtaataacacaaagctattatatgttatttctaggtaactccctttgtgtcaattatatttccaaaaatgaacctttaaaatggtatgcaaaattttgtctatatatatttgtgtgaggaggaaattcataactttcctcagattttcaaaagtatttttaatgcaaaaaatgtagaaagagtttaaaaccactaaaatagattgatgttcttcaaactaggcaaaacaactcatatgttaagaccattttccagattggaaacacaaatctcttaggaagttaataagtagattcatatcattatgcaaatagtattgtgggttttgtaggtttttaaaataaccttttttggggagagaattgtcctctaatgaggtattgcgagtggacataagaaatcagaagattatggcctaactgtactccttaccaactgtggcatgctgaaagttagtcactcttactgattctcaattctctcacctttgaaagtagtaaaatatctttcctgccaattgctcctttgggtcagagcttattaacatcttttcaaatcaaaggaaagaagaaagggagaggaggaggagggaggtatcaattcacatacctttctcctctttatcctccactatcatgaattcatattatgtttcagccatgcaaatctttttaccatgaaatttcttccagaattttccccctttgacacaaattccatgcatgtttcaaccttcgagactcagccaaatgtcatttctgtaaaatcttccctgagtcttccaagcagtaatttgccttctcctagagtttacctgccattttgtgcacatttgagttacagtagcatgttattttacaattgtgactctcctgggagtctgggagccatataaagtggtcaatagtgtttgctgactgagagttgaatgacattttctctctgtcttggtattactgtagatttcgatcattctttggttacatttctgcatatttctgtacccatgactttatcactttcttctcccatgctttatctccatcaattatcttcattacttttaaattttccacctttgcttcctactttgtgagatctctccctttactgactataacatagaagaatagaagtgtattttatgtgtcttaaggacaatactttagattccttgttctaagtttttaaactgaatgaatggaatattatttctctccctaagcaaaattccacaaaacaattatttcttatgtttatgtagccttaaattgttttgtactgtaaacctcagcataaaaactttcttcatttctaatttcattcaacaaatattgattgaatacctggtattagcacaagaaaaatgtgctaataagccttatgagaatttggagctgaagaaagacatataactcaggaaagttacagtccagtagtaggtataaattacagtgcctgataaataggcattttaatatttgtacactcaacgtatactaggtaggtgcaaaacatttacatataattttactgatacccatgcagcacaaaggtactaactttaaatattaaataacacctttatgtgtcagtaattcatttgcattaaatcttattgaaaaggctttcaatatattttccccacaaatgtcatcccaagaaaaaagtatttttaacatctcccaaatataatagttacaggaaatctacctctgtgagagtgacacctctcagaatgaactgtgtgacacaagaaaatgaatgtaggtctatccaaaaaaaaccccaagaaacaaaaacaatattattagccctttatgcttaagtgatggactcagggaacagttgatgttgtgatcattttattatctgattcttgttactttgaattaaaccaatattttgatgatataaatcatttccaccagcatatatttaatttccataataactttaaaattttctaatttcactcaactatgagggaatagaatgtggtggccacaggtttggcttttgttaaaatgtttgatatcttcgatgttgatctctgtctgcaatgtagatgtctaaacactaggatttaatatttaaggctaagctttaaaaataaagtacctttttaaaaagaatatggcttcaccaaatggaaaatacctaatttctaaatctttttctctacaaagtcctatctactaatgtctccattactatttagtcatcataaccattatcttcattttacatgtcgtgttctttctggtagctctaaaatgacactaaatcataagaagacaggttacatatcaggaaatacttgaaggttactgaaatagattcttgagttaatgaaaatattttctgtaaaaaggtttgaaaagccatttgagtctaaagcattatacctccattatcagtagttatgtgacaattgtgtgtgtgtttaatgtttaaagatgtggcactttttaataaggcaatgctatgctattttttcccatttaacattaagataatttattgctatacagatgatatggaaatatgatgaacaatattttttttgccaaaactatgccttgtaagtagccatggaatgtcaacctgtaacttaaattatccacagatagtcatgtgtttgatgatgggcactgtggagataactgacataggactgtgccccccttctctgccacttactagctggatgagattaagcaagtcatttaactgctctgattaaacctgcctttcccaagtgctttgtaatgaatagaaatggaaaccaaaaaaaacgtatacaggccttcagaaatagtaattgctactattttgttttcattaagccatagttctggctataattttatcaaactcaccagctatattctacagtgaaagcaggattctagaaagtctcactgttttatttatgtcaccatgtgctatgatatatttggttgaattcatttgaaattagggctggaagtattcaagtaatttcttctgctgaaaaaatacagtgttttgagtttagggcctgttttatcaaagttctaaagagcctatcactcttccattgtagacattttaaaataatgacactgattttaacatttttaagtgtctttttagaacagagagcctgactagaacacagcccctccaaaaacccatgctcaaattatttttactatggcagcaattccacaaaagggaacaatgggtttagaaattacaatgaagtcatcaacccaaaaaacatccctatccctaagaaggttatgatataaaatgcccacaagaaatctatgtctgctttaatctgtcttttattgctttggaaggatggctattacatttttagtttttgctgtgaatacctgagcagtttctctcatccatacttatccttcacacatcagaagtcaggatagaatatgaatcattttaaaaacttttacaactccagagccatgtgcataagaagcattcaaaacttgccaaaacatacattttttttcaaatttaaagatactctatttttgtattcaatagctcaacaactgtggtccccactgataaagtgaagtggacaaggagacaagtaatggcataagtttgtttttcccaaagtatgcctgttcaatagccattggatgtgggaaatttctacatctcttaaaattttacagaaaatacatagccagatagtctagcaaaagttcaccaagtcctaaattgcttatccttacttcactaagtcatgaaatcattttaatgaaaagaacatcacctaggttttgtggtttctttttttcttattcatggctgagtgaaaacaacaatctctgtttctccctagcatctgtggactatttaatgtaccattattccacactctatggtccttactaaatacaaaattgaacaaaaagcagtaaaacaactgactcttcacccatattataaaatataatccaagccagattagtcaacatccataagatgaatccaagctgaactgggcctagattattgagttcaggttggatcacatccctatttattaataaacttaggaaagaaggccttacagaccatcagttagctggagctaatagaacctacacttctaaagttcggcctagaatcaatgtggccttaaaagctgaaaagaagcaggaaagaacagttttcttcaataatttgtccaccctgtcactggagaaaatttaagaatttgggggtgttggtagtaagttaaacacagcagctgttcatggcagaaattattcaatacataccttctctgaatatcctataaccaaagcaaagaaaaacaccaaggggtttgttctcctccttggagttgacctcattccaaggcagagctcaggtcacaggcacaggggctgcgcccaagcttgtccgcagccttatgcagctgtggagtctggaagactgttgcaggactgctggcctagtcccagaatgtcagcctcattttcgatttactggctcttgttgctgtatgtcatgctgaccttattgttaaacacaggtttgtttgctttttttccactcatggagacatgggagaggcattatttttaagctggttgaaagctttaaccgataaagcatttttagagaaatgtgaatcaggcagctaagaaagcatactctgtccattacggtaaagaaaatgcacagattattaactctgcagtgtggcattagtgtcctggtcaatattcggatagatatgaataaaatatttaaatggtattgtaaatagttttcaggacatatgctatagcttatttttattatcttttgaaattgctcttaatacatcaaatcctgatgtattcaatttatcagatataaattattctaaatgaagcccagttaaatgtttttgtcttgtcagttatatgttaagtttctgatctctttgtctatgacgtttactaatctgcatttttactgttatgaattattttagacagcagtggtttcaagctttttgccactaaaaataccttttattttctcctcccccagaaaagtctataccttgaagtatctatccaccaaactgtacttctattaagaaatagttattgtgttttcttaatgttttgttattcaaagacatatcaatgaaagctgctgagcagcatgaataacaattatatccacacagatttgatatattttgtgcagccttaacttgatagtataaaatgtcattgctttttaaataatagttagtcaatggacttctatcatagctttcctaaactaggttaagatccagagctttggggtcataatatattacatacaattaagttatctttttctaagggctttaaaattcatgagaataaccaaaaaaggtatgtggagagttaatacaaacataccatattcttgttgaaacagagatgtggctctgcttgttctccataaggtagaaatactttccagaatttgcctaaactagtaagccctgaatttgctatgattagggataggaagagattttcacatggcagactttagaattcttcactttagccagtaaagtatctccttttgatcttagtattctgtgtattttaacttttctgagttgtgcatgtttataagaaaaatcagcacaaagggtttaagttaaagcctttttactgaaatttgaaagaaacagaagaaaatatcaaagttctttgtattttgagaggattaaatatgatttacaaaagttacatggagggctctctaaaacattaaattaattattttttgttgaaaagtcttactttaggcatcattttattcctcagcaactagctgtgaagcctttactgtgctgtatgccagtcactctgctagattgtggagattaccagtgttcccgtcttctccgagcttagagttggatggggaataaagacaggtaaacagatagctacaatattgtactgtgaatgcttatgctggaggaagtacagggaactattggagcacctaagaggagcacctaccttgaatttaggggttagcagaggcatcctgaaaaaagtcaaagctaagccacaatctataagcagtttaggaattagcagaacgtgcgtggtgaggagatgccaaaggcaagaagagaagagtattccaaacaggagggattccaaagagagaagagtatcccaaacaacatttgcacaaacctgatggggagagagaatgtggggtggggatggatgatgagactgaagaagaaagccaggtctagataatcagtggccttgtacaccatgttaaagagtgtagacttgattctgttgtaaacaggaaagcagcacaattcatatgaatattttagaagactcccactggaatatggagaataaagttggagatgactaatcctggaagcagggagaacatttttgaggaagttgcactattttggtgaaaatgatgatcataaacatgaagaattgtaggtgatcatgacctcctctctaattttccagaagggttttggaagatataacataggaacattgacaggactgacgaaaggagatgaaatacaccatataaattgtcaaacacaaggccagatgtctaattattttgcttatgtgttgaaattacaaatttttcatcaggaaaccaaaaactacaaaacttagttttcccaagtcccagaattctatctgtccaaacaatctgtaccactccacctatatccctacctttgcatgtctgtccaacctcaaagtccaggtctatacacacgggtaagactagagcagttcaagtttcagaaaatgagaaagaggaactgagttgtgctgaacccatacaaaataaacacattctttgtatagattcttggaacctcgagaggaattcacctaactcataggtatttgatggtatgaatccatggctgggctcggcttttaaaaagccttatctgggattccttctatggaaccaagttccatcaaagcccatttaaaagcctacattaaaaacaaaattcttgctgcattgtatacaaataatgatgtcatgatcaaataatcagatgccattatcaagtggaattacaaaatggtatacccactccaaaaaaaaaaaaaaagctaaattctcagtagaacattgtgacttcatgagccctccacagccttggagctgaggagggagcactggtgagcagtaggttgaagagaaaacttggcgcttaataatctatccatgttttttcatctaaaagagccttctttttggattaccttattcaatttccatcaaggaaattgttagttccactaaccagacagcagctgggaaggcagaagcttactgtatgtacatggtagctgtgggaaggaggtttctttctccaggtcctcactggccatacaccagtcccttgttagttatgcctggtcatagacccccgttgctatcatctcatatttaagtctttggcttgtgaatttatctattctttcagcttcagcactgcagagtgctgggactttgctaacttccatttcttgctggcttagcacattcctcataggcccagctcttttctcatctggccctgctgtggagtcaccttgccccttcaggagagccatggcttaccactgcctgctaagcctccactcagctgccaccacactaaatccaagcttctctaagatgttgcagactttacaggcaagcataaaaggcttgatcttcctggacttccctttacttgtctgaatctcacctccttcaactttcagtctcagaatgtaggcatttgtcctctttgccctacatcttccttcttctgaatcatgaaagcctctcacttcctcttgctatgtgctggaggcttctgtcaggttttagaatgagttctcatctagtcctagtagcttttgatgcttaagtccaccttttaaggatacctttgagatttagaccatgtttttcgcttgagaaagccctaatctccagacttgcctttctgtggatttcaaagaccaactgaggaagtcaaaagctgaatgttgactttctttgaacatttccgctataacaattccaattctcctcagagcaatatgcctgcctccaactgaccaggagaaaggtccagtgccaaagagaaaaacacaaagattaattatttcagttgagcacatactttcaaagtggtttgggtattcatatgaggttttctgtcaagagggtgagactcttcatctatccatgtgtgcctgacagttctcctggcactggctggtaacagatgcaaaactgtaaaaattaagtgatcatgtattttaacgatatcatcacatacttattttctatgtaatgttttaaatttcccctaacatactttgactgttttgcacatggtagatattcacatttttttgtgttgaagttgatgcaatcttcaaagttatctaccccgttgcttattagtaaaactagtgttaatacttggcaagagatgcagggaatctttctcatgactcacgccctatttagttattaatgctactaccctattttgagtaagtagtaggtccctaagtacattgtccagagttatacttttaaagatatttagccccatatacttcttgaatctaaagtcatacaccttgctcctcatttctgagtgggaaagacatttgagagtatgttgacaattgttctgaaggtttttgccaagaaggtgaaactgtcctttcatctgtgtatgcctggggctgggtccctggcagtgatggggtgacaatgcaaagctgtaaaaactaggtgctagtgggcacctaatatcatcatcatatacttattttcaagctaatatgcaaaatcccatctctgtttttaaactaagtgtagatttcagagaaaatattttgtggttcacataagaaaacagtctactcagcttgacaagtgttttatgttaaattggctggtggtttgaaatgaatcatcttcacataatgttttctttaaaaatattgtgaatttaactctaattcttgttattctgtgtgataataaagaataaactaatttcta

SEQ ID NO: 759 - DNA, 5206 bp, Homo sapiens
cccgccgcggaggccgagcgagcccccagcccagcctggcgactggggaccccggcacatgaggtggacgcccccggggaagacttgggtgcacagccaggcgagaaggtcttgagtcagacagagcaccagccttggggaccctggaccactatcatggagactgagagcgagcagaactccaattccaccaatgggagttctagctcagggggcagctctcggccccagatagctcaaatgtcactttatgaacgacaagcagtgcaggctctgcaagcactgcagcggcagcccaatgcagctcagtatttccaccagttcatgctccagcagcagctcagtaatgcccagctgcatagcctggctgccgtccagcaggccacaattgctgccagtcggcaggccagctccccaaacaccagcactacacagcagcagactaccaccacccaggcctcgatcaatctggccaccacatcggccgcccagctcatcagccgatcccagagtgtgagctctcccagtgctaccaccttgacccaatctgtgctactggggaacaccacctccccacccctcaaccagtctcaggcccagatgtatctacggccacagctgggaaacctattgcaggtaaaccgaaccctgggtcggaatgtgcctctagcctcccaactcatcctgatgcctaatggggcggtggctgcagtccagcaggaggtgccatctgctcagtctcctggagttcatgcagatgcagatcaggttcagaacttggcagtaaggaatcaacaggcctcagctcaaggacctcagatgcaaggctccactcagaaggccattcctccaggagcctcccctgtctctagcctctcccaggcctctagccaggccctagcggtggcacaggcttcctctggggccacaaaccagtccctcaaccttagtcaagctggtggaggcagtgggaatagcatcccagggtccatgggtccaggtggaggtgggcaggcacatggtggtttgggtcagttgccttcctcaggaatgggtggtgggagctgtcccagaaagggtacaggagtggtgcagcccttgcctgcagcccaaacagtgactgtgagccagggcagccagacagaggcagaaagtgcagcagccaagaaggcagaagcagatgggagtggccagcagaatgtgggcatgaacctgacacggacagccacacctgcgcccagccagacacttattagctcagccacctacacacagatccagccccattcactgattcagcaacagcaacagatccacctccagcagaaacaggtggtgatccagcagcagattgccatccaccaccagcagcagttccagcaccggcagtcccagctccttcacacagctacacacctccagttggcgcagcagcagcagcagcaacaacagcaacagcagcaacagcagcagccgcaagccaccaccctcactgcccctcagccaccacaggtcccacctactcagcaggtcccaccttcccagtcccagcagcaagcccaaaccctggtcgttcagcccatgcttcagtcttcacccttgtctcttccacctgatgcagcccctaagccaccaattcccatccaatccaaaccacctgtagcacctatcaagccgcctcagttaggggccgctaagatgtcagctgcccagcaaccaccaccccatatccctgtgcaagttgtaggcactcgacagccaggtacagcccaggcacaggctttggggttggcacagctggcagctgctgtacctacttcccgggggatgccaggtacagtgcagtctggtcaggcccatttggcctcctcgccaccttcatcccaggctcctggtgcactgcaggagtgccctcccacattggcccctgggatgacccttgctcctgtgcaggggacagcacatgtggtaaagggtggggctaccacctcctcacctgttgtagcccaggtccctgctgccttctatatgcagtctgtgcacttgccgggtaaaccccagacattggctgtcaaacgcaaggctgactctgaggaggagagagatgatgtctccacattgggttcaatgcttcctgccaaggcatctccagtagcagaaagcccaaaagtcatggacgagaagagcagtcttggagaaaaagctgaatcagtggctaatgtgaatgctaatactccaagcagtgaactagtagccttgacccccgccccttcagtaccgcctcctacactagccatggtgtctagacaaatgggtgactcaaaacccccacaggccatcgtgaagccccagattctcacccacatcattgaaggctttgttatccaggaaggagcagaacctttcccggtgggttgttctcagttactgaaggagtctgagaagccactacagactggccttccgacagggctgactgagaatcagtcaggtggccctttgggagtggacagcccatctgctgagttagataagaaggcgaatctcctgaagtgcgagtactgtgggaagtacgcccccgcagagcagtttcgtggctctaagaggttctgctccatgacttgcgctaagaggtacaatgtgagctgtagccatcagttccggctgaagaggaaaaaaatgaaagagtttcaagaagccaactatgctcgcgttcgcaggcgtggaccccgccgcagctcctctgacattgcccgtgccaagattcagggcaagtgccaccggggtcaagaagactctagccggggttcagataattccagttatgatgaagcactctctccaacatctcctgggcctttatcagtaagagctgggcatggagaacgtgacctggggaatcccaatacagctccacctacaccggaattacatggcatcaaccctgtgttcctgtccagtaatcccagccgttggagtgtagaggaggtgtacgagtttattgcttctctccaaggctgccaagagattgcagaggaatttcgctcacaggagattgatggacaggcccttttattacttaaagaagaacatcttatgagtgccatgaacatcaagctgggccctgccctcaagatctgcgccaagataaatgtcctcaaggagacctaaggtggccctcttgcacaaaccagcctaaggcagacactctccactgtccaggttataacctggtaccagcagactttgcagggaagaaagagttgttccaatcatgtaaccttctgtaggggattactgagacagggaagagaagtgcaagaattggttgctggtgctacatggcggcagctttgacattttctctgggttctactttattttttaaaatctttacagttctcaccatttcacgtaccttaatccaatctttataaaagaggcagtctagagaactaggactgctcagccttatcctggagtggagcatttagcccaggtcttaattctccaagaggaggaatacatagtatggtaaggcaaggaactgggtggaatgtcaggttgcctgcccaatgggagaggtagggtttttctagcttgtgtgacagaagtagcaaaatctggtcctcccccctcccagtgtagctgtggctcagagttttttctttttgttgtcacttactcccttgtgattgaattttttctcctgcatccatggcaggatccccagccagtatagagacttggttggcatcttctgctgcagggactaaaagtatttgactggggcacatgtggctgttgtcattctttctgcatcccactgttcccctccaatttatgttattttctaccctgtttttcagttccatctctgctctgtcctatagctttataaaaccagagtgtgtggggctgaggtcaggagtataagtacctgccttaggcactattccttatataacaaaaatattaaatatttttttcctcagtaaaaggatgaaaattggtttcagttgtcttactctattccagtctttgcccactttcacacaaatgacaaggccaatatgttttgtttgttttttaatcattaagagtttttgtacaaaaggtgatggttttttttcttcattttaaaacaccagggtgtgggggagggatgcaaacaaataacaaaaaagatgcttttgtaacattattttccctgtttagaaagaaaaaaatcactccaatagtattgaaaagtccaaagatgaaatagtttcattttcttttcctaaggcttataaaaggccccctgcctgttgattccatccctcttttgtgtccagtggagccatgttactcttcagtggcccaggggttcactattaaagaaagatcagtccaggtttctgggcacatggcctaaacaggaagatggaagcatcagaggattaaaaacctttccccacagaaatgtgggcaagaagacacttccctgagccagcagaagggacaggtgcagcagcattccacacccagcgcagaggacagcagagccctcgatgtcccacttctgcttccgttccctttctagaagattgaaaaaaaggtcaaaaccacatgcctgtggagaaagtgcgacatgtttagaaatactggtagggaaccaggagtaagaaaagctttaccagcttttactacaaatggatgaaagacatcaggatcccaccaccgcaaggtaaagtgacttcccttttctggaacccctgtggcacaggagtaccaattttcctttccaacgaactggatttctggataggcattttggctgtatgtggacagataagaccacagtccttagcccaatcccagctatacagtcaccccaatttccacaaatgatgtgatggtaccgtataatcctgtaattgggaaatttcacatttttcctgtcctaatctcagaggtgggagaagcaagtctagaacatctccaggctcagactaaacgagagtacttggactgcaaccaagtaatcactgcaaagtagttccaagcagcaagaaataccagattctcatggaggctactatagggtacagaataacaacatgaaagcaatcaaccctgtataaataatgtttcttggcattttttttttaattaaagaaatccagtgtctcaaaaaaaaaaaaaaaaaaaaaaaaaaaaaaaa

SEQ ID NO: 760 - DNA, 6947 bp, Homo sapiens
gggctgaaagacacacagaagtcttcatggatatagttgatacatttaatcatttaattcctactgaacacttagatgatgccctatttctaggatccaacctggagaatgaagtctgtgaggattttagtgcaagtcaaaatgtcttagaggactcgctgaagaacatgctcagcgataaggatcctatgctaggatctgcaagtaaccagttctgtttgcctgttttggatagcaatgatcccaatttccagatgccttgttcaacagttgttggtcttgacgatattatggatgaaggagttgttaaagaaagtggcaatgataccattgatgaagaagaactgattttacctaacaggaacttaagggacaaggtagaagaaaattcagtgagatctccaagaaaatcacctcgtttaatggcacaagaacaagtaagaagtttgcgacagagcactattgccaagcgttcaaatgcagcaccattaagtaacacaaaaaaagcatctgggaagactgtatctactgctaaagcaggagtgaaacaaccagaaaggagtcaggttaaagaagaagtatgtatgtcactgaaacctgagtaccataaggagaatagaaggtgcagccgaaatagcggacaaattgaagtggtacctgaagtatcagtgtcttcaagtcattcttcagtgtcatcttgtcttgaaatgaaggatgaagatggattagattctaagcataagtgtaataatccgggagaaatagatgtgccatctcatgaattaaattgttcacttctttcagagacttgtgttactattggagaaaagaaaaatgaagctttgatggaatgtaaagccaagcctgttggtagtccattgtttaagttttcagataaagaagaacatgaacaaaatgattccatttcaggtaaaacgggtgagactgttgttgaagaaatgatagcaacaagaaaagttgaacaagattcaaaggagacagtaaaattatcccatgaagatgaccatattcttgaggacgctggatcttctgatatttctagtgatgctgcttgtacaaatccaaataagacagaaaacagccttgtaggtttgcctagttgtgtagatgaagtgactgaatgtaatttggaattgaaggataccatgggtattgctgataaaactgagaacacccttgaaagaaataaaattgaaccgttgggttattgtgaagatgcggagtctaataggcagttggagagcactgagtttaataaatcaaacttagaggtggttgatactagtacttttggaccggaaagtaatatcttggaaaatgctatttgtgatgtgcctgaccaaaattcaaaacagttgaatgctatagaaagtactaaaatagagtcccatgaaacagcaaaccttcaggatgacagaaacagccagtcaagtagcgtttcttacttagagtcaaaaagtgtaaaatccaaacatacaaaacctgtaattcattctaagcaaaacatgaccacagatgctccgaagaaaattgttgcagcaaagtatgaagtaatacatagcaaaactaaagttaatgtcaaaagtgtgaaacgaaatactgatgtaccagaatctcagcaaaattttcataggccagtcaaagtcagaaaaaaacaaattgataaggagccaaagattcagagttgcaattctggggttaaatctgtgaaaaaccaagctcattctgtactgaaaaaaacattacaggatcaaactttagtacaaattttcaagcccttaactcattctttgagtgataagtcacacgctcatcctggttgcttgaaagaacctcatcatcctgcacaaactggacatgtatcacattctagccagaaacagtgtcataagcctcagcaacaggccccagcaatgaaaaccaatagtcacgtgaaggaagagcttgaacacccaggcgttgagcattttaaggaagaggataaactgaaactgaaaaaacctgagaagaacctacaaccccgccaaagaagaagcagcaaaagtttttctttagatgagccaccattgttcattccagataacatagctaccataagaagagaaggctctgatcatagctcctcatttgaaagcaaatatatgtggactcccagcaagcagtgtgggttttgcaaaaaaccacatggcaacaggtttatggttggctgtgggagatgtgatgactggtttcatggtgattgtgttgggttaagtctttctcaagcacagcagatgggcgaggaagacaaagaatatgtctgtgtaaaatgttgtgctgaagaagacaaaaagactgaaatactagatccagatactttggaaaaccaagctacagttgaattccatagtggagataaaacaatggagtgtgaaaagcttggattatcaaaacacacaacaaatgatagaaccaaatatatagatgatacagtgaagcacaaggtcaaaattttaaaacgggagtctggtgaaggcagaaattcatcagactgtagagataatgaaattaaaaaatggcagctagctcctcttcgtaagatgggacaaccagttttacctcggagatcctcagaagaaaaaagtgaaaaaataccgaaagagtctacaactgttacttgcacaggagaaaaagcttcaaaaccaggtactcatgagaagcaagagatgaaaaagaagaaagttgaaaaaggagtgcttaatgtacatcctgctgcttctgcttccaagccttctgcagatcagatcaggcaaagtgtcagacattctctcaaagacattcttatgaagagacttacagactcaaatttgaaggtaccagaggaaaaggcagcaaaagttgccacaaaaattgagaaagagcttttctctttttttcgggacacagatgctaaatataagaacaaatatagaagtttgatgtttaatttgaaagatcctaaaaacaatatattatttaaaaaagtactgaaaggagaagtaactcctgatcatcttatcagaatgagtccagaagaactagcttctaaagagttagctgcttggagacgaagagaaaacagacataccatagaaatgattgagaaagagcagagagaagtggaacgacggccaatcaccaaaataactcataaaggtgaaatagaaattgagagtgatgccccaatgaaagaacaggaagcagccatggagattcaggaaccagccgccaataagtcattggagaagccagaaggatctgaaaaacaaaaagaggaggttgactctatgtctaaagataccactagtcaacacagacagcatctttttgatctcaactgcaaaatctgcataggtcgaatggcaccacctgtagatgatctttctccaaaaaaagtaaaagttgttgtaggagtagctcgcaaacattcagacaatgaagcagaaagtatagcagatgcattatcttcaacctcaaatattttggcttctgaattctttgaggaggagaaacaggagtctccaaagtcaacgttctctcctgctccacgtccagagatgcctggaactgttgaagttgagtctacctttctggctcgattgaacttcatctggaaaggttttatcaacatgccttctgtggcaaaatttgttaccaaagcctatccagtatctggctccccagaatacctgacagaggacctaccagatagtattcaagtaggtggcaggatatcacctcagacagtttgggattatgtggaaaaaataaaagcatcaggaaccaaggaaatttgtgtggttcgcttcacaccagtaactgaagaagatcaaatttcttatactttgctctttgcatacttcagtagcagaaagcgctatggagtagctgctaacaacatgaagcaggttaaagatatgtaccttattcctttgggtgccacagataaaattccacaccctcttgtgccttttgatggacctgggcttgaactgcatagacctaatctattgttgggcttaattattcgtcagaaactgaagcgacagcacagtgcctgtgctagtactagtcatatagctgagactcctgaaagtgcaccaccaatagcattgccacctgataaaaaaagtaaaatagaagtttctacagaagaagcaccagaggaagaaaatgacttttttaattcttttacaactgtattacacaagcagagaaataaacctcagcagaatcttcaggaagaccttccaacagcagttgaacctttaatggaagtcaccaaacaggagccaccaaaacctttaagatttcttcctggcgtgttgattggctgggagaatcaacctactactctggaattagcaaataaacctcttcctgtggatgatatacttcaaagccttttgggcaccactggtcaagtatatgaccaggcccagtcagtgatggaacaaaacactgttaaagaaattccatttttaaatgagcagaccaactcaaaaatagagaaaacagataatgtggaagtaactgatggtgaaaacaaggagataaaagttaaagtagataatatttcagaatctacagataagtcagcagaaatagaaacatcagtagtagggtcctcttccatttctgcagggtctttgacgagtcttagtctcagaggtaagccaccagatgtttctacagaagcatttttaacaaatttatcaattcagtcaaaacaagaggaaactgtggagagtaaagagaaaacattaaaaagacagcttcaggaagatcaagagaataatttgcaagataaccagacttcaaatagttctccatgcagatctaatgtaggaaaaggaaacatagatggtaatgtgagctgtagtgaaaaccttgttgctaatacagcgaggtctccacagtttatcaacctgaaaagggatcctaggcaagcagcaggacgaagtcagcctgtaactacttcagaaagcaaagatggagatagttgccggaatggagaaaaacacatgctgcctggcctgtcacacaacaaggagcacttaacagaacaaatcaatgtagaggaaaagttgtgttctgcagagaaaaactcgtgtgttcagcagagtgacaatttaaaagttgcacaaaactcaccatcagtagaaaacatacagacttctcaagcagaacaagcaaaacccttacaggaggatattttaatgcaaaatattgaaactgtgcacccatttcgaagaggatcagcagtagcgacatctcattttgaagttggaaacacatgtccatcagaatttccttctaaaagcatcacctttacttccagaagcaccagccccagaacaagtacaaacttttcacccatgaggccacagcagcccaaccttcagcatctcaagtctagcccacctggatttccatttccagggcctcctaattttcccccacaaagcatgtttggatttccaccacatttgccacctccattacttccccctccaggctttggctttgctcaaaatcccatggttccctggccacctgttgttcatctcccaggtcagccacagcgtatgatgggtcctctctcacaagcatcaaggtatataggcccgcagaatttttaccaggttaaagacattcggaggccagaaaggcgccatagtgacccttggggtaggcaagaccaacagcaactggataggccatttaataggggtaaaggggaccgccagagattttatagtgattcacaccatttgaaaagagagcgacatgaaaaggaatgggagcaagaatctgaaaggcatagacgcagagacagaagccaagacaaggacagagacagaaaaagcagggaggaagggcacaaagataaagagagggcacggttatcacatggtgatcgaggaacagatggaaaagcaagcagagatagtaggaatgtagacaagaagccagataaacctaaaagtgaagactatgagaaggacaaagaacgagagaaaagtaaacacagagaaggagaaaaggacagggataggtaccacaaagatagggaccacactgacagaactaaaagcaaaaggtaaaatttgcaggctgcttcaggattacatttaaataactgttaaaatgttgtatcttgtaaacaaaagaaagattgcctgctaggattgtgccatctttaaaatttttactattggtcatttgcagaacagtaaattctgtgtgttggtacagagtgctctgtaccagtgctcatcatcccttcttcataccaacggtccctagttataggaatttaatatttttaaaagttttacattgctgtatattcaaagatttgttttattaatatgcaataaaggcttagaaattttagttttattccttaattggtaaatatggttaactatggaatatatttacttcctctagtgaatgtcctttatataatgactaatttgggagtaatgtgtgctctgtaagtttgttttaaattgcactgtttttaaagaaactgtagaggagcaacaaaaatccaagcaacttcataatcagattatgctaatcatttagttgagcagtttttgaccaagaatcagaagcccaaggggtacatttattgctttaatctgcactcattgaagtcatttattaccatatactacagctttgtggtaggccattattttcattttcatttttggctcttcagaaacttgaatacttaagcttgtacatgatcttgtgttttgctatcctttttactgtaaaatgtaaatattttaagggatattttgattctaaatatgataaaataatttctcacctattttgtgtgtgtgacttgaaattcagtagtaaaagaatttcttctttaaagcttt

SEQ ID NO: 761 - DNA, 6463 bp, Homo sapiens
ctctcttgctcgctcgctccctctctctcctgctggctgcctgttctaggaagccagcgcggagaggggggggatgcacagcacaggggagagagattgcgcatgttggtcagtcgtgttttaaagagtacagtgcggggaggctgagaggggcgcatgcaacaacaacttttggaaggatggaagagaagaggcgaaaatactccatcagcagtgacaactctgacaccactgacagtcatgcgacatctacatccgcatcaagatgctccaaactgcccagcagcaccaagtcgggctggccccgacagaacgaaaagaagccctccgaggttttccggacagacttgatcacagccatgaagatcccggactcataccagctcagcccggatgactactacatcctggcagacccatggcgacaggaatgggagaaaggtgtgcaggtgcctgccggggcagaggccatcccagagcccgtggtgaggatcctcccaccactggaaggcccccctgcccaggcatccccgagcagcaccatgcttggtgagggctcccagcctgattggccagggggcagccgctatgacttggacgagattgatgcctactggctggagctcatcaactcggagcttaaggagatggagaggccggagctggacgagctgacattagagcgtgtgctggaggagctggagaccctgtgccaccagaatatggccagggccattgagacgcaggaggggctgggcatcgagtacgacgaggatgttgtctgcgacgtgtgtcgctctcctgagggcgaggatggcaacgagatggtcttctgtgacaagtgcaacgtctgtgtgcatcaggcatgctacgggatcctcaaggtgcccacgggcagctggctgtgccggacgtgtgccctgggtgtccagccaaagtgcctgctctgccccaagcgaggaggagccttgaagcccactagaagtgggaccaagtgggtgcatgtcagctgtgccctatggattcctgaggtcagcatcggctgcccagagaagatggagcccatcaccaagatctcgcatatcccagccagccgctgggctctgtcctgcagcctctgcaaggaatgcacaggcacctgcatccagtgttccatgccttcctgcgtcacagcgttccatgtcacatgcgcctttgaccacggcctggaaatgcggactatattagcagacaacgatgaggtcaagttcaagtcattctgccaggagcacagtgacgggggcccacgtaatgagcccacatctgagcccacggaacccagccaggctggcgaggacctggaaaaggtgaccctgcgcaagcagcggctgcagcagctagaggaggacttctacgagctggtggagccggctgaggtggctgagcggctggacctggctgaggcactggtcgacttcatctaccagtactggaagctgaagaggaaagccaatgccaaccagccgctgctgacccccaagaccgacgaggtggacaacctggcccagcaggagcaggacgtcctctaccgccgcctgaagctcttcacccatctgcggcaggacctagagagggttagaaatctgtgctacatggtgacaaggcgcgagagaacgaaacacgccatctgcaaactccaggagcagatattccacctgcagatgaaacttattgaacaggatctgtgtcgaggcctgtccacctcattccccatcgatggcaccttcttcaacagctggctggcacagtcggtgcagatcacagcagagaacatggccatgagcgagtggccactgaacaatgggcaccgcgaggaccctgctccagggctgctgtcagaggaactgctgcaggacgaggagacactgctcagcttcatgcgggacccctcgctgcgacctggtgaccctgctaggaaggcccgaggccgcacccgcctgcctgccaagaagaaaccaccaccaccaccaccgcaggacgggcctggttcacggacgactccagacaaagcccccaagaagacctggggccaggatgcaggcagtggcaaggggggtcaagggccacctaccaggaagccaccacgtcggacatcttctcacttgccgtccagccctgcagccggggactgtcccatcctagccacccctgaaagccccccgccactggcccctgagaccccggacgaggcagcctcagtagctgctgactcagatgtccaagtgcctggccctgcagcaagccctaagcctttgggccggctccggccaccccgcgagagcaaggtaacccggagattgccgggtgccaggcctgatgctgggatgggaccaccttcagctgtggctgagaggcccaaggtcagcctgcattttgacactgagactgatggctacttctctgatggggagatgagcgactcagatgtagaggccgaggacggtggggtgcagcggggtccccgggaggcaggggcagaggaggtggtccgcatgggcgtactggcctcctaactcacccccttccctgtcccaggccctgccctggtccccccacaaggcctcagcccagtcacaactgccatttccagtctctgctgagtgtcccagaccctcgaggctgccactccgtcgtggttttatttttaatatagagagagttttgaattctacactgttgtctttcctctgtgctggcctaggacattaggattccttccacggctccggccgctaggaccctgccaggtcccgcgcaccatccctgccctgcccacgtggtattgctgggctcctggctagatgcaagcaaggtggacaagagctcaggactccagcccactgccactgggtgacacagactgtcgtttgggcattatttcatggcagatgggccagtccagggcctaccccgccttgcccccagatcccactggggtccatttggggggtcctgctacactccaccgatccccaaggaagtataataaacgatacccagccagagtctactcactgtcacaagcacaacgagtttatatgagaaagcactgagggggtgcagagggcccgctagttccaggggaactgaaagctgttcctgatcagcccgtatcatctgaggcctgcctgcccaccctgccaccctcccctcccttgctgctctgcccctgccagtgcccagcccagcggctctgggaaggggttcccagaatccctcctgagctgtgccatttactcaggggactcccaaacagccagctgccagtgcaggtggagggctgtaggggagggccagtgcccagacagggtcatggggctcagaccagcccactgtagagaatcactctgaggctccaacttccttccttccttcggggccagtctcggccgaagtctggtcacgctcagacagagctgaccagaccagaccgtttgccttttcaagtttcctagtcctgctacaagatgagcttcttccgtggtttccttttggaaactcctccttccaacaagcagtgggatcccggggcccagggcgggccggtgttggccgctggggctgttgtaagtcttgctggatgttcccctgttcctgagccttaacccctcgcacagccatccccccccccgtcctgccatccccccccgccgtcctgccttccccaccccacccttaggtcccaggtagttgctctgaagagtttcagtagagtggccccagggtgatagctcagggaacaacaaaaaaggaattccgtgaaaacatttttttttctttgatgaattactcctgggtcacttccaccactggtaaagccagaacttctccaaaaagaaccttgcaaaaagtccagtgaatcagtcgaatcattctgtggatgccaaagaatattttgaccataatacagcacagcctggacctgacaacttgtcatttggacttttttttaaatggagttctttagcaacaaagtatagaaacatgttcattgcacacacccaaggagaagagctcaagcgcttggaagaggatgctttgctgctgctgaagtgtacctgggtgttagatttcagatcctgggctgagcccactgtgagctttcctaaactgtgagactcacagaggggaaagatactgacggtgaaaccagcatggaaaacgtctttaccatgtggttccctcctccccaaatacataaagcaaataagcaggatggggaacagcttgaccttcatccacccctaactccaaaactatcaaggtacgacagtggcattgtcatcgacactcaatttcatgtgaattttagcaaaacaggaaacaaagataatgactcagttcagaggatcggacaaatgtgtctagtccgggtggactcggagggagtggggtgggcttcaaggattctgggcgttgggatggcatgagctaccctgtagagtttagtctgcctgcccgccttggtagtagtgaccagtcagtgtcagcatcagtgtcccaaccccagtctctgtttactgcctttgaacagaacttcttccttccccatgctttgggtcacctcgggctgcaaccctgtctgtgccagattgcccggtctgaccctgcaggaagcaaagaggtgagcttaaagaacaaccaaactctgccaggggtcccagaaagcccagggtccagcagtctcagcacttggccccttgccccttcacaccatcctggggcaggggctgggcctccctggtggcaggggtgggtggagaattagggagagggtgcaacgagtctggccccttgcctcgggctggctggtgttcttccaagagcctctgctcacattgttggcctctggattctggcccttcttcattggctgttgctttggactggactgttgctgagcctgtgtcctgcagaacccagatgtctgttaggctggctggctgctgcgaggggaggggggtggcctttcatttggggtgccctttcactcccaggccaagccctggagcaatcttcttcaggcagctgtctccacctccaggatgtccagcaggctgcaaggagaaggatgccagccacccatcctcccccagttcccagcctttcccctgttggtcacagccgcttctgtctttttccggtctactgtccccagtgtagagggctttgctgtccctgagactgaggcaggttccttttccaggtcagaggtggaggtagatctttctctcaaccacatctgcctccacacacagctcctccgcagggaaggagaagctgctctgtaactcattctggctatcgtcccccttctcactgacctgaccgcccaccacctccttccccctcatcacatgacaaaggataatgtgcaagaaaagtatttttatgtatcataaatgtattttgaaacaaatgagaagaagaaaggtagaagggtttattttattaaatgagcctgacttagtgacagtgtgtgagcatttgcaatgtaagggcctcagcttccttggagaagccaccccaggtttccagacatagatgttgaattgtttgtggggggtgtgccaggccacgtctcgtgtgtccgtatgcaggcatgcctgtgtatactgtgtatgggcacactgggactagctgggacaattcctagagattcaactgcccaattctaaccaacattggcagcggctgaacttggcatttccttgctaactgccagatgtggccaacctttgtccatatgcaaaccactgaaaaatgatctggatttctatagcaaggcccttggggagggcactctcccatgcccttggcctcgctggccacattggccaatgagccagggctggagtctgagacctttggttgttctttaaggcacctcctgccactttctccctcagaggcacaaacactttgtgttccacgtcagtttgaggggacggtggggggatgatatgaatgtcacaggaggagacaccttctgtctttgtttcaaagaaagtgatgtgccatttgttaatatacaagagaaatattgaaaatatattgaaaagagcaattttaaattatttttggcttatgttgcaatatttattttcttgtattagaaaagattcctttgtagagaaaaaatgtatttttcattaacgcaaagacctatttctcctttttgtacattgtccatgtgcgcaacccttaacgagcaatagaatgtatggtcacctgggtgtggccagtgcccgctgtgccctgcatgattctgtgttgccgctgctgcatagttcccagccccatcctgtcctgctcactcatgggggcttccagaccccggccccaccagggcttgtgtcatagggagccctttgcactcctcgtgtgttggcaaacgcagttaataaagcagtgttttctgtgc

SEQ ID NO: 762 - DNA, 4932 bp, Homo sapiens
atacaatagtgctccgcgccgcctcagccgccgccgccgcccaaccgcctgcccagcgctgaggcctgacgggccgggcggacgagggccgagggcgggagctgaggcgcggggggcggccccggcggggggcgggggcgaggaggggattaaggggcaggtgcgagggagggaagagaagaaagcgagcggttaggggggcggttaccactccgaccggactcacccggcacattgccgggccgcggcgtggagccgggcaggagccgcgagccagctgcgcgaaggatgctccaggatgaaacgccataggcctgtcagcagcagtgacagttcagacgaaagtccttccacttcctttacttctggctcaatgtataggatcaagtcaaaaattccaaatgaacacaagaaacctgctgaggtattccggaaggacctcatcagtgccatgaaacttccagattctcaccacattaatcctgatagctattacctctttgctgatacatggaaggaagaatgggaaaagggagtccaggtaccagccagtccagacaccgttccacagccttctctcaggattatagctgagaaggtaaaggacgttctgtttatccgaccccggaagtatattcactgctccagcccagacaccacagagcctggctacatcaacatcatggagttggcagcatctgtttgccgctatgacctagatgacatggacatcttctggcttcaggaactcaatgaagaccttgcagaaatgggttgtgggccagttgatgagaatcttatggaaaagacagtagaagtcctggaacgccattgccatgaaaatatgaaccatgctattgagacagaggaagggctaggcatagagtatgatgaagatgtgatctgtgatgtgtgccggtctccagacagtgaagaagggaatgatatggtgttctgtgataagtgtaacgtctgtgtgcatcaggcctgctatggcatcctcaaggtcccagaaggcagctggctgtgtcgctcctgtgtcctgggcatttatccgcaatgtgtgttatgtccaaagaaaggtggagccctgaagaccaccaagacagggactaaatgggctcatgtcagctgtgccctgtggatcccagaggtcagcattgcttgtcctgagaggatggaaccgatcacgaagatctcccacatcccacccagtcggtgggccttagtctgcaacttgtgcaagttgaagacgggggcttgtattcagtgctctataaaaagctgcatcactgccttccacgtcacctgtgcctttgagcacggcctagagatgaagaccatcctagatgagggagacgaagtgaagttcaagtcatattgcctcaagcatagccaaaacaggcagaaacttggagaagctgagtacccccaccacagggctaaagagcagagccaggccaaaagtgagaaaaccagcctgcgggcacagaagcttcgggagctggaggaggagttctattccttggtacgagtggaagatgtggccgcagagctgggtatgcccacgctagctgtggactttatctataactactggaaactgaagcggaaaagtaacttcaataagccattatttcctccaaaggaggatgaagaaaatgggctggtgcagccaaaagaggaaagcattcacactcgaatgagaatgtttatgcatctacgccaggacctggagagggtccgaaatctgtgctatatgataagcagacgagagaagctgaagctgtcacacaacaaaatacaggaacagatcttcggtttgcaagtccagcttcttaaccaagaaattgatgcagggcttcctttgacaaatgcacttgaaaactcactgttttacccaccaccaagaattaccttgaagttaaaaatgcccaaatcaaccccagaagaccacagaaacagctccacagaaaccgatcagcagccccactctcctgacagcagctcatctgttcacagtataaggaacatgcaggtgcctcaggagtcactagaaatgagaacaaaatcgtatccgagatacccactagagagcaagaataaccgtttgctggccagtctcagccattctaggagtgaagcaaaggagtccagtcctgcttggagaaccccgtcctcggagtgctatcatgggcagtcactgggaaagcctctggtccttcaggctgccctccatggacagtcttccattgggaatgggaaaagtcagcctaactccaagtttgccaaatccaatggcctggagggcagctggtctgggaatgtcacccaaaaagacagctcgagtgagatgttctgtgaccaggagcctgtgttcagcccccacttggtcagtcagggcagctttagaaaatccactgtagaacactttagtaggtcctttaaagagaccaccaataggtgggtgaagaacacagaggacctccagtgctatgtgaagccaaccaagaatatgagccccaaggagcagttctggggtagacaggttctcaggcggtctgcagggagagctccatatcaggaaaatgatggctattgcccagatttggagctgagtgattcagaggcagaaagtgatgggaataaagaaaaagtcagggtaaggaaagatagctcagacagggaaaatcctccccatgactctagacgggattgccatggtaaaagcaagacacatcccctttcccacagttcaatgcaaaggtgattagaaacttccaaggatgacccaacctttgcctttgccccatatattggggaaaacccatacaccaaaaggattttagcatatgttaagaggaattgcagtgaaaaggataacatttttccatagtaaattgtcttgcagtttttgaaaatgtttcaagtctagtttttacaagcacattacagtaattgcaggttgtccagaggttggtttgtcagaggctattgggaacagctgggcccagggtatttgctcagtaaatattttggggcagctttccggttatataacacattgacaagtatatgtattaagagtccttgcattgttaactgatttgcaagagaccatgattatcagacactaaaactacttatcttttgaagctacagcatgtgactccccagagctcctgtctgtaggaagtttctaattccctggtatctataaacccttttcaggggagagaccggagaccccatcttagatactgtcaactcactactgtcttcctttgttctgcacaaggttgagtttctttcacagtatcttaacttactgagtcaatactcctcatgcttatcagtgtccagtgcctgttcctaaacttgcttgttggggacacactcataactatttcacctgactgacaagcataaaaggctaacttgtggatagtgtttacaaaagtacaaaagtactacttccaaggaaaatgctctgattctctgtttaggcatttgtgaaggattccagagcctttcccaaagtgagaccatttctggggtatttgtaccaggtcagggtttttgtgttgttttcaaataagtttgactaaaataagtttggctgacagtttttgtatacctgctttaatgtttataaaatttttattgaggtataattaaaatatagtaaaatgcacagaggttaagtattcttacctgctttaattttgaaacagatttttattgtcaaacagaatttgaaagcatgtgtttaacacatggatataatttagctttgtgtcacctttgaatctgaggcagtttcccaaacaaaaaggctggagccatttttcagaagttgcttataccctgttcccaaactatcagccttgattaatttctagtaggaagagaataattacatttgcgggggggggggtggataaaaaacatgtctgcttctcatttaaataagagagaaatgatgccgttttttaaatgtgaagcagactataattctcagctctcttttcttcttagccttaaattaatattctctttcttctagttttggaaagtgtagtgggaatattcagacaaaagaggccattttccatttttaaagcttcttactggtgaaacagcccagttgtagtaggtgccagtcagtcaaggcaggggccctctctccgtcaatatggaaaactcagcagttttcctctcccccagttgtgttcttgtaacgttgttaatgggttcctttgctttttgctttctccttttctgaaaatgtatgtgttttgcctctcttttggctacatcttcaaaatatttcttttgtgcctatgtacatgtgtaaacatgccatagcatgtgtggtaggtgtcctgtattttgtttgggaaaaaaactatcaaaatgaggaagagaatttcccctatttatgcactaggtttctgtgctttttctttgagttctctggagtagatattaatttgataccttcatggtaatgaaattatgatggagctgtgttataaattccttatgtcagaggccagtgcggtagcctttgtcccttcatgcctttcaattctgagtgggaggaaaagcaaacatcaaaacagtgcttcagccaaattccatatgtaatgccattgggagagtattgactaaaatatcattcgtcagggaaatatagttgtaatatttttacaggatattcctaggtaaatgaaggagccttcagttgtaaatttcaattaccccaaaatgtatttgctacattttgttgtttgaagtattacctcttaaccttctttgttaatttttttcattttgtcttatatagtccagttttccaagataagctcagtcctttttcaaatgtcccctttttaccaatactttttcattaaattatgaaaactgcta

SEQ ID NO: 763 - DNA, 3244 bp, Homo sapiens
ctctccggcgtctccgcctggaggggaagatgcggcctgcctggcccgccgcctcgcccccggcctcacggtgggaccccgggcactgaggacggaggtcccgggcgccggcccgcggggcaacgggcactaggtgagagccggacgcgggcgagcgaaggaggcgggtgccgggcgactccagcggcggcccctgcccctcccccgcacccacgaacacgctcgcccgatatattgcagaggcttctccggtcgccgctgcgccagtttttttttgtttgtttgttgtgttttccctggcaaacagctggagaaagagcagctcatggagaggctgagagaagcggttttcgcgtcctacccaaactgggagagtaaccttcagcagctggactcaccgattggttttccttcattttcagtgaaatcccattctctggctggagacacagatggcctcaaatgagagagatgctatatcgtggtaccaaaagaagattggagcctacgatcagcagatatgggaaaagtcaatcgaacagactcagattaagggtttgaaaaacaaaccgaaaaagatgggccacataaagccagacttgattgacgttgacttaatcagagggtcaacatttgccaaagcaaaacctgaaattccatggacatctctgactcggaaggggcttgttcgagttgtattttttccattgttcagcaattggtggattcaggttacctctttaagaatctttgtttggctgttactactttatttcatgcaagttatagcaattgtcttatatttgatgatgcctattgtgaacataagtgaagtacttggacccttgtgccttatgctactcatgggaactgtccactgtcaaattgtgtctactcagataacaagaccatcaggaaacaatggaaatcgaagaagaagaaaattacgaaaaactgtaaatggtgatgggagccgagaaaatggaaataactcctctgataaagtcagaggaatagaaactttggaatctgtacccattattggtggtttttgggagactatctttggcaacaggattaaaagagtaaaattaatatctaacaaagggactgaaactgacaatgacccaagttgtgtccatcctatcattaagaggagacaatgtcgaccagagattagaatgtggcaaacaagagagaaagcaaaattttcagatggagaaaagtgccgtagggaggcttttaggcgtttgggtaatggggtgtctgatgacctgtcaagtgaagaagatggtgaagcacggacacagatgatattattgcgtaggagtgtggaaggggcctcaagtgacaatggttgtgaagttaagaatagaaaatcaatactttcaaggcacctaaactctcaggtaaagaaaaccactacaaggtggtgtcatattgtgcgggattcagatagtctggctgaatcagaatttgaatcagcagccttcagccagggctctagatcgggtgtgagtggtggctctcgaagcctcaacatgtcaagaagagactcagaaagcacccgccatgactcggagactgaggacatgttatgggacgacctgctacatggcccagagtgccggtcatctgtcaccagtgacagtgagggggcccatgtgaatacccttcactcagggaccaaacgtgaccccaaagaggatgtttttcagcagaatcatttattctggcttcagaattcaagtccttcctctgatcgagttagtgcaataatctgggaggggaatgagtgcaaaaagatggatatgtctgtgttggaaataagtggcatcatcatgagcagggtcaatgcctatcagcaaggagtaggttatcagatgctgggaaatgttgtcactattggattagcattttttccattcttacatcgacttttccgtgagaagagccttgaccaactaaagtccatttcagctgaggagatcttgactctcttttgtggggcaccacctgttacacctattattgttttgtcgataattaatttttttgaaagattgtgtcttacttggatgttttttttcatgatgtgtgtggcagagagaacatataaacagagatttttatttgcaaaactcttcagccatattacttctgccaggaaagctaggaaatatgaaatacctcatttcagacttaagaaggtggagaatattaaaatatggttatcactgcgttcctatctaaagagacgggggccacagcgttcagttgatgtggttgtatcctcggttttcctactgacactttcgattgctttcatttgttgtgctcaggttctccaaggacataaaactttcctgaatgatgcttataactgggagtttttgatctgggaaacagctttactactttttttattgcgtctggcctcactggggtctgaaaccaataagaaatacagcaatgtttcaatattacttacagaacagattaatttatatcttaagatggaaaaaaagccaaataagaaagaacagcttactctagtaaacaatgtattaaagctgtccaccaagttgttgaaagagctggacacaccatttagactctatggactgacaatgaatcccttaatctacaatatcacaagagtagttatcctttctgctgtctcaggtgttataagtgatcttctaggatttaatataagactgtggaaaattaaatcataagctgagtaaatgcctggactctcccctggctggtatcaaaacttacctatcaaggaaagtgatgactgcagaaaccagtgagatacccacctgcttgttcacatgcacaggtgctctcagctctgccaaagcgaatgaatggtgtttccggaggagcaagtccttttccaactgggtgtgcatgctaaaaacctgtattttcatgcttttcaaacaacatgaatagtcagctgactaaagactgtgtgtgttgtggtaacacaaagacaattttgtaagtttgcgcttcagtactgtgacagttatgtttactggacatagtcttttgggcaactatgatagatgcccaaagcatgaagcaaatatcttttattggaaatatgcaaattcaatacttttccattatagtctatagaactggagatttcatttctctatcaaagagagatcaagcgaactattttaggttaaatccgaataaaagaactttactggagactttc

SEQ ID NO: 764 - DNA, 2309 bp, Homo sapiens
gcgggggcgggccggggcggggccaggccggctagaggggcgggtctagcggcggcccccggcgaagttcactgcgcttgcgctgacagacgcaagatggcggacagtgcggaactaaagcaaatggttatgagccttagagtttctgaactccaagtactgttgggctacgccgggagaaacaagcacggacgcaaacacgaacttctcacaaaagccctgcatttgctaaaggctggctgtagtcctgctgtgcaaatgaaaattaaggaactctataggcggcggttcccacagaaaatcatgacgcctgcagacttgtccatccccaacgtacattcaagtcctatgccagcaactttgtctccatctaccattccacaactcacttacgatggtcaccctgcatcatcgccattactccctgtttctcttctgggacctaaacatgaactggaactcccacatcttacatcagctcttcacccagtccatccggatataaaacttcaaaaattaccattttatgatttactggatgaactgataaaacccaccagtctagcatcagacaacagtcagcgctttcgagaaacctgttttgcatttgccttgacaccacaacaagtgcagcaaatcagtagttccatggatatttctgggaccaaatgtgacttcacagtacaggtccagttaaggttttgtttatcagaaaccagttgtccacaagaagatcacttcccacccaatctttgtgtgaaagtgaatacaaaaccttgcagccttccaggttaccttccacctacaaaaaatggcgtggaaccaaagcgacccagccgaccaattaatatcacctcacttgtccgactgtccacaacagtaccaaacacgattgttgtttcttggactgcagaaattggaagaaactattccatggcagtatatcttgtaaaacagttgtcctcaacagttcttcttcagaggttacgagcaaagggaataaggaatccggatcattctagagctttaattaaagagaagttgactgcggatccagacagtgaaatagctacaaccagcctaagggtttctctactatgtccacttggtaaaatgcggctgacaattccgtgtcgggcccttacatgttctcatctacaatgttttgacgcaactctttacattcagatgaatgagaaaaaaccaacctgggtttgtcctgtctgtgataagaaggctccatatgaacaccttattattgatggcttgtttatggaaatcctaaagtactgtacagactgtgatgaaatacaatttaaggaggatggcacttgggcaccgatgagatcaaaaaaggaagtacaggaagtttctgcctcttacaatggagtcgatggatgcttgagctccacattggagcatcaggtagcgtctcaccaccagtcctcaaataaaaacaagaaagtagaagtgattgacctaaccatagacagttcatctgatgaagaggaagaagagccatctgccaagaggacctgtccttccctatctcccacatcaccactaaataataaaggcattttaagtcttccacatcaagcatctccagtatcccgcaccccaagccttcctgctgtagacacaagctacattaatacctccctcatccaagactataggcatcctttccacatgacacccatgccttacgacttacaaggattagatttctttcctttcttatcaggagacaatcagcattacaacacctccttgcttgccgctgcagcagcagcagtttcagatgatcaagacctcctacactcgtctcggtttttcccgtatacctcctcacagatgtttcttgatcagttaagtgcaggaggcagtacttctctgccaaccaccaatggaagcagtagtggcagtaacagcagcctggtttcttccaacagcctaagggaaagccatagccacaccgtcacaaacaggagcagcacggacacggcatccatctttggcatcataccagacattatttcattggactgattcccaggccctgctgctcccatccccaccccagatcgaatgaacttggcagaaagaagagaactttgtgctctgttttaccttactctgtttagaaaagtatacaagcgtgttttttttcctttttttagggaaaaaattaaaagaaatgtacagagaacaaaactatattttcagttttacttttgtatataaatctaagactgcctgtgtgataaaacacttgtttaaaaaaaaaaaaaaaaaaaaaaaaaaaa

SEQ ID NO: 765 - DNA, 2902 bp, Homo sapiens
ggcatttgcggccggcgccagggtggagagttgtgcgccggtccctgggcctgagctccggctccggctggggcgcctgcgatgtctcaagatggcggagctgggcgaattaaagcacatggtgatgagtttccgggtgtctgagctccaggtgcttcttggctttgctggccggaacaagagtggacggaagcacgagctcctggccaaggctctgcacctcctgaagtccagctgtgcccctagtgtccagatgaagatcaaagagctttaccgacgacgctttccccggaagaccctggggccctctgatctctcccttctctctttgccccctggcacctctcctgtaggctcccctggtcctctagctcccattcccccaacgctgttggcccctggcaccctgctgggccccaagcgtgaggtggacatgcacccccctctgccccagcctgtgcaccctgatgtcaccatgaaaccattgcccttctatgaagtctatggggagctcatccggcccaccacccttgcatccacttctagccagcggtttgaggaagcgcactttacctttgccctcacaccccagcaagtgcagcagattcttacatccagagaggttctgccaggagccaaatgtgattataccatacaggtgcagctaaggttctgtctctgtgagaccagctgcccccaggaagattattttccccccaacctctttgtcaaggtcaatgggaaactgtgccccctgccgggttaccttcccccaaccaagaatggggccgagcccaagaggcccagccgccccatcaacatcacacccctggctcgactctcagccactgttcccaacaccattgtggtcaattggtcatctgagttcggacggaattactccttgtctgtgtacctggtgaggcagttgactgcaggaacccttctacaaaaactcagagcaaagggtatccggaacccagaccactcgcgggcactgatcaaggagaaattgactgctgaccctgacagtgaggtggccactacaagtctccgggtgtcactcatgtgcccgctagggaagatgcgcctgactgtcccttgtcgtgccctcacctgcgcccacctgcagagcttcgatgctgccctttatctacagatgaatgagaagaagcctacatggacatgtcctgtgtgtgacaagaaggctccctatgaatctcttatcattgatggtttatttatggagattcttagttcctgttcagattgtgatgagatccaattcatggaagatggatcctggtgcccaatgaaacccaagaaggaggcatctgaggtttgccccccgccagggtatgggctggatggcctccagtacagcccagtccaggggggagatccatcagagaataagaagaaggtcgaagttattgacttgacaatagaaagctcatcagatgaggaggatctgccccctaccaagaagcactgttctgtcacctcagctgccatcccggccctacctggaagcaaaggagtcctgacatctggccaccagccatcctcggtgctaaggagccctgctatgggcacgttgggtggggatttcctgtccagtctcccactacatgagtacccacctgccttcccactgggagccgacatccaaggtttagatttattttcatttcttcagacagagagtcagcactatggcccctctgtcatcacctcactagatgaacaggatgcccttggccacttcttccagtaccgagggaccccttctcactttctgggcccactggcccccacgctggggagctcccactgcagcgccactccggcgccccctcctggccgtgtcagcagcattgtggcccctgggggggccttgagggaggggcatggaggacccctgccctcaggtccctctttgactggctgtcggtcagacatcatttccctggactgagttccctggattatggaaacttcgctgtcccccaacactgagcaagtatgctgtggagtcccaaccccagctactctgatccctctgggggctctggccaagggccagacagaccttcacagatgcctacttttggcctcatctctgcctgacaaggccagcacccaaagggttaatatttaacctctttttaaggacactggggtctgtttctggaaatgttctttagatggtggcacattcctttgggtatgttaacctaggcagtgggaggcaaatgggatggtatgtgagctaggagaagggctgaaccctcagccttgactatgtctagagcctcttggggaaggggcacctctcttgaaccccaaatgctctctcttcttattacccaaacccatggctctatttcttcttcacatccattgtctcttcatgtctattccattcccttcggccaaacagacaggtggaaaaactgagacaggcagtttcagagatggacagagaactttattttggattgtggatgtggacttttttgtacataaataagaaaaaccaaaatactccaaagatgacttcccctgcctcctactccagtatgacagaggaggatgtaaggccttagccatgatctgcaggggtctgggagtcaggcccggcctattgcttgggtctctctctatttatatatctaagttcacagtgtttcttattcccccctaagcttctagaggctcatggccctgtagttaggcctggctcattctgcacctttccagggaggtggaaggaccctgtgccctccttcccaatcttctttttcaggctcgccaaggcctaggacctatgttgtaattttactttttatttctaaagttgtagtgaagctctcacccataataaaggttgtgaatgttc

SEQ ID NO: 766 - DNA, 1835 bp, Homo sapiens
ggtgaccaagatggcggcggagctggtggaggccaaaaacatggtgatgagttttcgagtctccgaccttcagatgctcctgggtttcgtgggccggagtaagagtggactgaagcacgagctcgtcaccagggccctccagctggtgcagtttgactgtagccctgagctgttcaagaagatcaaggagctgtacgagacccgctacgccaagaagaactcggagcctgccccacagccgcaccggcccctggaccccctgaccatgcactccacctacgaccgggccggcgctgtgcccaggactccgctggcaggccccaatattgactaccccgtgctctacggaaagtacttaaacggactgggacggttgcccgccaagaccctcaagccagaagtccgcctggtgaagctgccgttctttaatatgctggatgagctgctgaagcccaccgaattagtcccacagaacaacgagaagcttcaggagagcccgtgcatcttcgcattgacgccaagacaggtggagttgatccggaactccagggaactgcagcccggagttaaagccgtgcaggtcgtcctgagaatctgttactcagacaccagctgccctcaggaggaccagtacccgcccaacatcgctgtgaaggtcaaccacagctactgctccgtcccgggctactacccctccaataagcccggggtggagcccaagaggccgtgccgccccatcaacctcactcacctcatgtacctgtcctcggccaccaaccgcatcactgtcacctgggggaactacggcaagagctactcggtggccctgtacctggtgcggcagctgacctcatcggagctgctgcagaggctgaagaccattggggtaaagcacccggagctgtgcaaggcactggtcaaggagaagctgcgccttgatcctgacagcgagatcgccaccaccggtgtgcgggtgtccctcatctgtccgctggtgaagatgcggctctccgtgccctgccgggcagagacctgcgcccacctgcagtgcttcgacgccgtcttctacctgcagatgaacgagaagaagcccacctggatgtgccccgtgtgcgacaagccagccccctacgaccagctcatcatcgacgggctcctctcgaagatcctgagcgagtgtgaggacgccgacgagatcgagtacctggtggacggctcgtggtgcccgatccgcgccgaaaaggagcgcagctgcagcccgcagggcgccatcctcgtgctgggcccctcggacgccaatgggctcctgcccgcccccagcgtcaacgggagcggtgccctgggcagcacgggtggcggcggcccggtgggcagcatggagaatgggaagccgggcgccgatgtggtggacctcacgctggacagctcatcgtcctcggaggatgaggaggaggaggaagaggaggaggaagacgaggacgaagaggggccccggcccaagcgccgctgccccttccagaagggcctggtgccggcctgctgaccccggccgcacactcgactttcctggtgctcaccacgcagaggggcacgggccagcctcgggcgcagagggaggagtgacctttctttttctttttattgtcgttcgttttgtttttccacccttttgcctggctcctggcacctgtacctctggactctcctatcgggggattaaaaaaaaaagtaaaatgaaaaaaaaaaaaaaaaaaaaaaaaaaaaaaaaaaaaaaaaaaaaaaaaaaaaaaaaaaaaaaaaaaaaaaaaaaaaaaaaaaaaaaaaaaaaaaaaaaa

SEQ ID NO: 767 - DNA, 2642 bp, Homo sapiens
gtttctctccctgcccccgcgacttcgcgcaagatccgggaaggacacccgaggcccctgggagaccctggggaggtgaaaatcagagagcgaagcgggccgtggcccctaggcctgacccctccccgcggggtaaggcgggcaccccgcgagcgcaggggtcctcttactgctgatggcacccagctctgggcccagacgccgctcaccgtccaccgccggtgctgggtaaaatgtcggttccaggaccttaccaggcggccactgggccttcctcagcaccatccgcacctccatcctatgaagagacagtggctgttaacagttattaccccacacctccagctcccatgcctgggccaactacggggcttgtgacggggcctgatgggaagggcatgaatcctccttcgtattatacccagccagcgcccatccccaataacaatccaattaccgtgcagacggtctacgtgcagcaccccatcacctttttggaccgccctatccaaatgtgttgtccttcctgcaacaagatgatcgtgagtcagctgtcctataacgccggtgctctgacctggctgtcctgcgggagcctgtgcctgctggggtgcatagcgggctgctgcttcatccccttctgcgtggatgccctgcaggacgtggaccattactgtcccaactgcagagctctcctgggcacctacaagcgtttgtaggactcagccagacgtggagggagccgggtgccgcaggaagtcctttccacctctcatccagcttcacgcctggtggaggttctgccctggtggtctcacctctccagggggcccaccttcatgtcttcttttggggggaatacgtcgcaaaactaacaaatctccaaaccccagaaattgctgcttggagtcgtgcataggacttgcaaagacattccccttgagtgtcagttccacggtttcctgcctccctgagaccctgagtcctgccatctaactgtgatcattgccctatccgaatatcttcctgtgatctgccatcagtggctcttttttcctgcttccatgggcctttctggtggcagtctcaaactgagaagccacagttgccttatttttgaggctgttctgcccagagctcggctgaaccagcctttagtgcctaccattatcttatccgtctcttcccgtccctgatgacaaagatcttgccttacagactttacaggcttggctttgagattctgtaactgcagacttcattagcacacagattcactttaatttcttaattttttttttaaatacaaggagggggctattaacacccagtacagacatatccacaaggtcgtaaatgcatgctagaaaaatagggctggatcttatcactgccctgtctccccttgtttctctgtgccagatcttcagtgcccctttccatacagggatttttttctcatagagtaattatatgaacagtttttatgacctccttttggtctgaaatacttttgaacagaatttcttttttttaaaaaaaaacagagatggggtcttactatgttgcccaggctggtgtcgaactcctgggctcaagcgatccttctgccttggcctcccgaagtgctgggattgcaggcataagctaccatgctgggcctgaacataatttcaagaggaggatttataaaaccattttctgtaatcaaatgattggtgtcattttcccatttgccaatgtagtctcacttaaaaaaaaaaaaaagaaaaagaaatggataatttcatctactgcctttacttggggttaatgtgattcttaaacaccttcatcatggaactctcagagtggggtccgttttggtttcctggtggtgggttttgaaagataagggaaagcacattttgagcatgtctgggtaccatggtgcggatgcttgggaaccagaactgtttcagaggaatctaaagtctgattttagttttcagagacacagcttgttgtaaaacatgagaagacatgatttctaggactcaagcagcaagccaggattctaggttggctgctgtgtcatctttgaagtcaagacaaagctgggctcgaccttcaagggtcctcgttttgataatacttcagaatagggaactcatgtgaatactactatgtagaaataaaacctagaccttgagcgaacatctgtatattggttgaaaacgatagtggtaaccattgatcccccttcatttgatgtttggaaaattccagtaattatcatttttgcaacgaatatggataccacatagtactttggtgttacctgcttttgaaaaataaagtctttggttcacccggtgaactatttatgagttcttttggtgtgaagaaagggctcatgttgcatttccagccattgctacaaagaacctttatttgttcagtaacggtagaaaatccttcccgattaaaaacttcagacttgctgaatatcctgcaatgtcaagatgaccgatgttgagttgggtggatttgctaacgagtcagatttgaacatgaggctattggaacccaataggcgtcattgatggcggcaagccatagctttcaagttttaataaaatgcacaaaagagaaaaaaaaaa

SEQ ID NO: 768 - DNA, 1811 bp, Homo sapiens
agggaggccgactagcgcaggcggacgggagagaatgggggaggggtgggatgggagcaggggcagagacgggcagagggcagagggcggagcggcgccggagcgggcgtcatggcgcggctcctctggttgctccggggcctgaccctcggaactgcgcctcggcgggcggtgcggggccaagcgggcggcggcgggcccggcaccgggccgggactgggggaggcagggtctcttgcaacgtgtgagctgcctcttgccaagagtgagtggcaaaagaaactaaccccggagcagttctacgtcacaagagaaaagggaacggaaccgcctttcagtgggatctacctgaataacaaggaagcaggaatgtatcattgcgtgtgctgcgacagtccactcttcagttctgagaaaaagtactgctctggcactgggtggccttcgttttccgaggctcatggtacgtctggctctgatgaaagccacacagggatcctgagacgtctggatacctcgttaggatcagctcgcacagaggttgtctgcaagcagtgtgaagctcatctaggtcacgtgtttcctgatggacctgggcccaatggtcagaggttttgcatcaacagtgtggctttgaagttcaaaccaaggaaacactgaccatcttcaagagtcccgttcccttgccaccccttcacgtgcaccctcaatttccacaattcacttgaatgacttgttttatttgcaataaaactgggctgaatttgctgctgtctccagcgagtcattgcttctcttaatttatttacctggaatcaacttaatcctgtgtgttaggctgttcttgtgttgctataaagaagtacctgatcaggatctgggagaatttgaaaaaaaaagaaaaactagaaaaataaacaaaattaaaaagaaaaaaaaatacctgagactgagtaacttataaagaaaagaggtttaattgactcacagttctgcagggtgtacagaaagcatggtgccagcatttgctcggattctggggagacctgagggagcttttactcatggcagaaggtgaagggggagccggcgtctcacatggcaaagcaggagcaagagagagtggtagggaggtgccacatacttttaaacagccagatctctcaagaactcactcactgtcaccaggacagcaccaagccatgagggatccaccctcatgacccagttacctcccggcagggcccacctccggcactaggaattatacttcaacataagatttggagagggaaaacatccaaaccatatcacccaactcccacttggagtagaacttcacaaaacgacagagggacagctgtttccatcaaacacttccacagcttcacctgagacgagggcatgactctgggaacatcaggaggctgatggactattaagccaaacaattcctacaaaaattccctgcaccttccactgcgtttcagtccttgacagacataagtaagggatcaagtgagaagaggaaggaaaatacaggatccaaggaatcaacaatgctagcactgaagagcaggattacggaggagctgtgctctgggagcatatatggtgatcaatcagatgcatgacttttttttcaaaattttaaatgtcttgagcatgctacttccaaccattctacccacaaataaactgcaataggacttggttagatttcaatgattatgaataaatgttcaccttcataccttctggttacaaagctaaactttaaaatgtccaaataaaatattcactaaaattta

SEQ ID NO: 769 - DNA, 2383 bp, Homo sapiens
cctggcgcagggactgctggaacctggctgtgcgcgctgtcgctttaagacagactctgccggcgccgtccggagccttagaaaccggccccggatcgcgagccggagccggagccggagccggggccggccgggctgctgaggcccgagcggcaggagcgcagcgcggagcgctgagccaggcgcccagtcgcgagaagctgccgccgcctctgcccgcccggcgccgcagccccgggcggtccatggggcgggcacggcgtcgctgcaggcgccggcagccctggagggcagccgcttaggcgctgcgctcttgtccccgcaggtcgcagccagggcggcggggcgcgcccagccccggcccctggagcgcccgccgcggtccccacctccatggacgccttcaaggggggcatgagcctggagcggctgccggaggggctccggccgccgccgccgccaccccatgacatggggcccgccttccacctggcccggcccgccgacccccgcgagccgctcgagaactccgccagcgagtcgtctgacacggagctgccagagaaggagcgcggcggggaacccaaggggcccgaggacagtggtgcgggaggcacgggctgcggcggcgcagacgacccagccaagaagaagaagcagcggcggcaacgtacgcacttcacaagccagcagttgcaagagctagaggccacgttccagaggaaccgctaccccgacatgagcatgagggaggagatcgccgtgtggaccaacctcaccgagccgcgcgtgcgggtctggttcaagaaccggcgagccaagtggcgtaagcgcgagcgtaaccagcagctggacctgtgcaagggtggctacgtgccgcagttcagcggcctagtgcagccctacgaggacgtgtacgccgccggctactcctacaacaactgggccgccaagagcctggcgccagcgccgctctccaccaagagcttcaccttcttcaactccatgagcccgctgtcgtcgcagtccatgttctcagcacccagctccatctcctccatgaccatgccgtccagcatgggcccaggcgccgtgcctggcatgcccaactcgggcctcaacaacatcaacaacctcaccggctcctcgctcaactcggccatgtcgccgggcgcttgcccgtacggcactcccgcctcgccctacagcgtctaccgggacacgtgcaactcgagcctagccagcctgcggctcaagtccaaacagcactcgtcgtttggctacggcggcctgcagggcccggcctcgggcctcaacgcgtgccagtacaacagctgaccgccccgccgcaccacgcgggccggcggccggagcggggaagggcgcgggcgcgggcgcggaggacgcacgcggggccccggctcgcaagccccagctcaccgcgccgcggacctcacacctgcgcagccccctcctcccacttcccactccgggttggttttgtgtttgcttttccggaccccactctgccctccaaaaagacaaaaaaaaaaaaaaaaaaaaaaaagcaaaaagacgtcggagaaaagtgccgcgaaaaaatggatgagttgcaatttctctcgggatggcgcgggtggtgtgtgtgttcccacgggccccggaggcccactccgcggagggcacgcggcgcggtaggcgagcgccgaggcccagcggccgggggaggacgacctcgtatcccgcgtccccgccgcgctggatccggactgagtggccgggcctgcggactggatgtgcggggcctggacttgcctaggatttcccgaccccgtacaaaccaagttgccctctccgagctaggcccggccgagagcgccttagctcgagtcggatccgtgttggggcgggcgttgggtttggggggacggtgcccccagcccaggatcgggcactcagtggagccgcacacggccccggcgcgcctggtagagcctcgctggccccgcgccccggagccctatattaaggccacggagcgacagcgggcagtgcgggcctggcgggaggtgggggaggtccatctcagaacaccccagccttgagcttagctgcaggcccaggccctctgctctgctcccgggctaggaggtggccctctgtctgggcgaacagccccctcctcaccgcccgccgtgcaagagtcgagccggcagagcaaggggcgcggccccagggccctgcgcccactttgcacacccgctctccggcccgcgcccctgtttacagcgtccctgtgtatgttggactgactgtaataaatctgtctatatcgacttgtccatgtacgtctattaaaaccatagtccgagcgtgctaagca

SEQ ID NO: 770 - DNA, 2337 bp, Homo sapiens
gttaggccaacagggaagcgcggagccgcagatctggtccgtcgctcgcctgggtgcctggagctgagctgcggcaaggcccggctcctgttcgaccgcccgaggggtgtgcgtgtgcgcgttgcggagggtgcgctcagagggccgcgtcgtggctgcagcggctgctgccgccgcaggggatctaatatcacctacctgtccctgtcactcttgacacttctctgtcagggctgccgcgtggggggggggcgggcagagcgcggtcggcgttagctttccttattggaggggttcttgggggagggagggagagaagaagggggtctttgcccactcttgtttcgctttggagcttggaagcctgctccctaaagacgctctgagtggtgcccttctgcccacatcccatgtcttcgtttgcccgctgactttccgtctccggactttttcgcttgagccttccggaggagacgggggcagcttggcttgagaactcggcgggggttgcgtcccctggctctccccgcagcggggaaactccgcgcctagagcgcgacccggagcgggcagcggcggctacgggggctcggcggggcagtagccaaggactagtagagcgtcgcgctccctcgtccatgaactgcatgaaaggcccgcttcacttggagcaccgagcagcggggaccaagctgtcggccgtctcctcatcttcctgtcaccatccccagccgttagccatggcttcggttctggctcccggtcagccccggtcgctggactcctccaagcacaggctggaggtgcacaccatctccgacacctccagcccggaggccgcagagaaagataaaagccagcaggggaagaatgaggacgtgggcgccgaggacccgtctaagaagaagcggcaaaggcggcagcggactcactttaccagccagcagctccaggagctggaggccactttccagaggaaccgctacccggacatgtccacacgcgaagaaatcgctgtgtggaccaaccttacggaagcccgagtccgggtttggttcaagaatcgtcgggccaaatggagaaagagggagcgcaaccagcaggccgagctatgcaagaatggcttcgggccgcagttcaatgggctcatgcagccctacgacgacatgtacccaggctattcctacaacaactgggccgccaagggccttacatccgcctccctatccaccaagagcttccccttcttcaactctatgaacgtcaaccccctgtcatcacagagcatgttttccccacccaactctatctcgtccatgagcatgtcgtccagcatggtgccctcagcagtgacaggcgtcccgggctccagtctcaacagcctgaataacttgaacaacctgagtagcccgtcgctgaattccgcggtgccgacgcctgcctgtccttacgcgccgccgactcctccgtatgtttatagggacacgtgtaactcgagcctggccagcctgagactgaaagcaaagcagcactccagcttcggctacgccagcgtgcagaacccggcctccaacctgagtgcttgccagtatgcagtggaccggcccgtgtgagccgcacccacagcgccgggatcctaggaccttgccggatggggcaactccgcccttgaaagactgggaattatgctagaaggtcgtgggcactaaagaaagggagagaaagagaagctatatagagaaaaggaaaccactgaatcaaagagagagctcctttgatttcaaagggatgtcctcagtgtctgacatctttcactacaagtatttctaacagttgcaaggacacatacacaaacaaatgtttgactggatatgacattttaacattactataagcttgttattttttaagtttagcattgttaacatttaaatgactgaaaggatgtatatatatcgaaatgtcaaattaattttataaaagcagttgttagtaatatcacaacagtgtttttaaaggttaggctttaaaataaagcatgttatacagaagcgattaggatttttcgcttgcgagcaagggagtgtatatactaaatgccacactgtatgtttctaacatattattattattataaaaaatgtgtgaatatcagttttagaatagtttctctggtggatgcaatgatgtttctgaaactgctatgtacaacctaccctgtgtataacatttcgtacaatattattgttttacttttcagcaaatatgaaacaaatgtgttttatttcatgggagtaaaatatactgcatacaaaaaaaaaaaaaaaaaaaaaaaaa

SEQ ID NO: 771 - DNA, 1407 bp, Homo sapiens
ggagcgcccgagcggagaggcggcccgggagcaggggggcggcccccactccggccgggtgcccggcccctggcccctgcctgccctctagatcgccgccgcagccgccgctactgggagtctgcctgttgcaggacgcactagccctccctccatggagttcggcctgctcagcgaggcagaggcccggagccctgccctgtcgctgtcagacgctggcactccgcacccccagctcccagagcacggctgcaagggccaggagcacagcgactcagaaaaggcctcggcttcgctgcccggcggctccccagaggacggttcgctgaaaaagaagcagcggcggcagcgcacgcacttcaccagccagcagctacaggagctagaggcgaccttccagaggaaccgctaccccgacatgagcacgcgcgaggagatcgccgtgtggaccaacctcaccgaggcccgcgtgcgggtgtggttcaagaaccggcgcgccaaatggcggaagcgcgagcgcagccagcaggccgagctatgcaaaggcagcttcgcggcgccgctcggggggctggtgccgccctacgaggaggtgtaccccggctactcgtacggcaactggccgcccaaggctcttgccccgccgctcgccgccaagacctttccattcgccttcaactcggtcaacgtggggcctctggcttcgcagcccgtcttctcgccacccagctccatcgccgcctccatggtgccctccgccgcggctgccccgggcaccgtgccagggcctggggccctgcagggcctgggcgggggcccccccgggctggctccggccgccgtgtcctccggggccgtgtcctgcccttatgcctcggccgccgccgccgccgcggctgccgcctcttccccctacgtctatcgggacccgtgtaactcgagcctggccagcctgcggctcaaagccaaacagcacgcctccttcagctaccccgctgtgcacgggccgcccccggcagccaaccttagtccgtgccagtacgccgtggaaaggcccgtatgagcggccccgcccgtagatcatccccgagggcgggggcaacgattcacagcctccgcggactggggtcattttgactggcttgctcccgccccagggtctgaaaggggtgtttgggcagctggggggcaccggctcaggagagggccttcccctcccagccctgaggggtggactaggccctacacacagaccgcgcccctgggactaaagccaggaacagggaccagctccccgggggccaactcacccttggcccatcccgccttctccaggcttcccctccctcgttttcaaagataaatgaaataaacgtgcgcggactgtcaaaaaaaaaaaaaaaaaaa

SEQ ID NO: 772 - DNA, 4997 bp, Homo sapiens
gcgtcgccctcctcccattgagcgaggctgtgtcgcgtggcccagcgtcggcgtgacggttggacgcgggcgcggcactgcgggtcccgattgctgcagccgcttgtcagtgtgatgaagattggcacccagacaccattcgcttttcacccaagatgatttgatgtcttataaaactctgatgaaccatgatggctacacagacattaagtatagacagctatcaagatgggcaacagatgcaagtagtaacagagttaaagacagaacaagatccaaactgctctgaacccgatgcagaaggagtgagccctccccctgtggagtctcagaccccgatggatgtggacaagcaggccatttataggcatccactatttccattattagctttgttgtttgaaaaatgtgaacaatctacacagggctctgaaggcacaacttctgccagttttgatgtagacatcgaaaattttgtaagaaagcaagagaaggaagggaaacctttcttttgtgaagatccagaaactgataatttaatggtaaaagcaatccaggttttgcgcattcatcttcttgagctggaaaaggttaacgaactctgcaaagatttctgcagtcgatacattgcttgtctgaaaacaaaaatgaacagtgaaactctgttgagtggagagcctggaagcccgtactcaccagtgcagtcccagcagattcaaagtgccatcacaggcaccatcagccctcagggaattgtggtgccggcgtccgcgctgcagcagggaaacgtagccatggcgacggtggcaggtggcacagtgtatcagcctgtcacggtcgtcactccccaaggccaagtggtcacacagacattgtcgcctgggacaattaggatccagaactcccagcttcagttacagttaaaccaagatctcagcatcttgcatcaagatgatggttcatctaagaacaagaggggcgtcctgccaaagcatgccacgaacgtgatgcggtcctggctcttccagcacatcgggcatccctacccaacagaggatgagaaaaaacagattgctgctcagacaaatttgacactactccaagtcaacaactggttcatcaatgccagaagacgaattcttcagccaatgttggattcaagttgttcagagacccccaaaacaaagaaaaaaactgctcagaaccggccagttcagaggttttggcctgattctattgcatcaggagtcgcacagccaccgccgagcgagctcaccatgtcggaaggagctgttgtcaccatcaccacgcccgtgaacatgaacgtggacagccttcagtctctgtcctcggacggggccaccctggcggtgcagcaggtcatgatggcagggcagagcgaggacgagtctgtggacagcacagaggaggatgcgggtgccctggcccctgcccacatcagcgggctggtcttggagaacagtgactccctgcagtaggggcaggagcagacgcacctgactttttggagtttgcacagcaaacattttacacagttttatttctaatatgttttatatgtagatatagaagagtgcacttttgtatttcatagtaagcttaaagcgcgtctttgccggtgcagcgacttctttcaagtgtgtgtgtgtgtgtgtgtgtgtgtgtgtgtgcgtgtgtgcgtgtgtgtggatttttaaagaaattctttaaaggtttaacgctagattgtgaggaatgacacaccactccctccccaccttgaatccctaattagattaaggaatagcgctgccattttctaaaccgtgatgcggttgtcacttagttctgtggttccagcagatctcagtgggctggttgatttgtgtggcccatggatttgaaagaagctgctgcacccgaaactgccagtgtgcggtgacaacggcacacgcctagactgagtgtggtttcgtcgtgagtggatggacggcaagcttagcaagcctaagtcccctcatgttcagtgagcctgtttcatttgctatatagaaaaagaaactcctatttttaccttgctggaattattggataaaaaagctatttttataaattcgttatgaattggatgatgactatattgaggataaaatttctagagaagaaacaatacatgcttgctattaatatttcaatttggaatgttctgaattgaccaaatttaatgaacctgcccaaagttagctaccgttccatggttctttgctctccccgggtagtgatgaacatttactactataaaagaaacagctatttaatgaaattttgatatctgcaaatttttgttgatatgtaatgctcagattgcattttacacttgatctaaacatatatcgaaagatatctgctaaacaggacttcaggtaagtgaggtgaaatggtagccagtgacccgttaggagctctcaccgtacatactccagtctaatttaaatctgaccacagttgcatggtcgctttaccatgttagctgtgtattgttttaaaagttttaacttcaaaatatgttatgcacagaatgtttattataaactaatataaaatgtgctctaccccattggctcagagctagggcaaacagcagatattcagactttattacttaactagcggacatccctggagtcccagcagcgagctggtctggcgagggcacctcggcagcccccacgggttggctcctacgtttgcgtttgtggctggtctcctggtgtcagtgttctcttgtacgttgttgctttcgacttttcagagccctcctgctcacttgaccacgtgagatttggaataactgtaggacttctgtttcctggtaacaagatgaaccgagagagtgggctgggttctgttttctttggttttgatttgttttcattgtttacttaggagtggtgctttttctcagaaaacaggccacggtgtttcatacagaatgtcttcatatcatctgaaatggtatggctgaagttcatttgtttacagggtcgggaatgtcttcagttcttgagagtcaacagtaatgattggttgtaagccaagggacattttaagctagtgaagagttttttctggaattgatttttcccaaaagaatatattaattgaggttaagaagtcagtgggaaacacacagaaatttgttttaaaatctttcaggagctttactgaaagacttggttatcaagtcttttggggagagaatgacattttttttttgagacagagttttgctcttgttgcccaggctggagggcaatggtgcaatctcagctcactgcaacctccacctcttatgttcaagcaattctccttccttagcctcctgagtagctgggattacaggcatgcgccaccacacccggctaattttgtatttttagtagagatgggtttctccatgttggtcgggctggtctcgaactcccgacctcaggtgatctgcctgcctcagcctcccaaagtgctgggattacaggtgtgagccaccgcgcccggccgagaatgacatcttaaagccaccattgcgttcctcatttgtgaactgtcttctcatattttaagtcaagtctataagatcatttttaacctaagttccaactttgttggactccttaaaataagcacccatgaaagccagccagcccttcctccttccctcaccaccctccgtctcttcggctgcttgctctttagtgtagattagtggaagccattcacagaatgtagactcatgtataggtcaccgtttctttcccccactagaaatcacattcactaagcagtggattgaatttaagagtgctgcccctgcccggcgcagtagggcgtgcctctagttccagctactcgggagtctgaggcagaggatggcatgtgccaggagtttgaggctgcagtgcactatgcttgcacctgtgaatagccactgcactccatcttgggcaacacagtgagacccccatctataaaaagagagcactgcctgaacctcggtggcactgggaagctctggcctgagagttaaacacccatgctgaatgatacagtgtgcattctctccagctgcaaactttcttcaactttcctaaattcttactaaattcagaggaataggataaagatcacttagagaaagggtgcttatggacatagcctgagtttcctttaacctctctgcaatgggtgcttttaactagcttctacatggcaagctgtttcagtttgcaaaatcactgcccagcatgtttgaggtcagttggcaccttaaaacacctgttctccagcccttggacagtggagagaatctgtaaaagtgtgaccccctctaagatttcgttttaaatgatcagattcggttccagttttattcttgttgagtttttccctatgaaggctccttttgaatgtgtcttgagacccaaattgagcatgttgctgttattcctgccctgcacctgtggagcaggagtggcagggctggctgtgctgggttccagctcgctcccaccgagggactagcttggcctttgcgctttgattccagatagtaagatgagtggaagtgtttatcgagcatgcaaaagaaaccctcacggctaagggctctgggagttgtgtctgtgtgacctgagagtgatccatctcctgcctgtgtgaggtagcagtgggcacttttcattgagacaaactccagggtgtccagagggggttctgccccttgtgaaggcccattcctggcacttagagacagaaagaactcagcaatctttcgttctagttatattcggtctttgaaactgacaatctttgaaatgtgaatactgtaacaatatgttttcttggattgttgtctttaaaaaggatttttgtgaagcaattgatttatcaaagcaaaaaaattaaaaatagaaacttgcaaaaaaaaaaaaaaaaaaaaa

SEQ ID NO: 773 - DNA, 3730 bp, Homo sapiens
gtgtgaagggggggtccggggggcgggtccctgtgccgctgacgtcccgagcagtgctgggaagtataggctgtgttgtcacgccggtgtcagtctgatgaagattggcatcaggtgaagtctggagcaggacttctgaggctttctatcctccatgctgctcactagaaaaggggctgtgaactgtgctttggctctagcagacaggaagaaattctggcccagctggaagtagaaagaggggagtgagtctcctgaggaccatctcagaggccccgggatcacccgaacagtcctccatgtgaatcaatcccatgatgcaacatgcctccccagcccccgctctgacgatgatggccacgcagaatgtcccgcccccaccctaccaggacagcccacagatgacggcaaccgcccagccaccctccaaggcccaggctgtccacatctctgccccctcagctgctgccagcacacctgtgcccagtgcccccatcgacccccaggcccagctggaggctgacaagcgagctgtatacaggcaccctcttttcccgctcctgacgctgctgtttgagaaatgtgaacaggccacccagggctctgagtgcatcacctccgccagctttgatgtggacatcgagaactttgtccaccagcaggaacaggagcacaaacccttcttcagcgatgacccagaactggacaatctgatggtgaaggcaatccaggtcctgagaatccacctgctggagctggagaaagtcaatgaactctgcaaggacttttgtaaccgttacatcacctgcctcaaaaccaagatgcacagcgacaacctgctcaggaatgatctaggggggccctactcccccaaccagccctccatcaaccttcactcacaggacctcctgcagaattcccccaattccatgtccggagtctccaataacccccaggggattgtggtcccagcctcagcgctccagcagggcaacatcgccatgacaaccgtcaactcacaagttgtgtcaggtggagccttataccaaccggttaccatggtaacctcccagggtcaggtggtcacccaagcaatcccccagggagccatccagatccagaacacacaggttaaccttgacctcacctccctcctggacaatgaggataagaagtccaagaacaaacgaggagtcttgcccaagcatgccaccaatataatgcgttcttggctcttccagcatctcatgcacccctaccccacggaggatgagaagaggcagatcgcagcccagaccaacctcaccctcctgcaagtaaacaactggttcatcaatgcccggaggcgcatcctgcagcccatgcttgatgccagcaacccagatcctgcccccaaagccaagaagatcaagtctcagcaccggcccacccaaagattctggcccaactccatcgctgcgggggtgctgcagcagcagggcggtgccccagggacaaaccccgatggttccatcaacttggacaacctgcagtccctgtcctcagacagtgccaccatggccatgcagcaggctatgatggctgcacacgatgactcattggatgggacagaagaagaggatgaggatgagatggaagaggaggaggaggaggagctggaggaggaggtcgacgagctgcagacgacaaatgtcagcgacctgggcttggaacacagtgactccctggagtagtcgggcagcccagatggcactgatcactgagcaggagaggagtgtcgccgggaggccttcagggtgggggggaaggggacatgggcaggaagcaccgagggagttgggccctagcttccccaaatcagtagcttgaagaaaggcaaaggagacacctgttccttcccaaccaccgagcttcaatgaggaccccagccccacttccctggaactgccgaggactctgtttggcggggccagtcgagcagcctgtgtggaaagacaggagtgagatctggactcaccaaatccctgaggatagatggcacccatggcccccacccacggaaggacttgagttgtttacaagccctgcactgaggcagattggtgctgttcgcagagtaggcctttgcccgggggcagacttagaaggaaggggagagacaaagggggactgagtttcatccccagaagtttctcagctcctttgacagacattcaagggcaggagggagccccaaagcataaccagtggccagaggagtgggagggcctgaggcatcacatcttgcagatcagaatgggatggaatccaccaggctccagctcatccctccaaggccctgtctctgcgcacagcaaccatggacatgggagaaagggatgggagccacagtgcccttcactctctcctggaaaccaactgtaagctggtgggctcaacctgtgggaggttaagaggagtcccttctgggttgactccaagagccaaggagatggcagaccctgggctaggaaccatatggaggtgactttgaggccacagctgtccctaggtgatcacagaacttagctcctttaacaacaggacaatggttttttaccctagatgttcccaccttcagtgctccacgccctccatagaccttcagagaaggtgaaaccaggttatctgggaatctttccagcccgcaggtcgccacggccatccctttgctcccagcctggctccatcagcctccagcttcctttcttcattctgtccttcagggaaggcagaagaaacattggaaagcatctagtccagtgggaagccaggggttggagaaggtgctacatccctcttcccatcaatatcctaaatgtgggggagggcccagagaatggcacccaagagcctgcggggatgcccatcccacacaccccacccagctgttctaaccctgctatccacagccctggaggaactggggctcctggaaggaggaggaggctctccactgtccaccctaacacataccctcccacccaccttccagacccccttggttggcaccctctcctccggttccctctcaccccatggctgtgaatgacaggacaggtcacacgtgtgttttccattgggtttaatttaatggacgtgcagtttcatttgtaaattgtgcattggccacctccttcagtggcaggatgtgagtggctacctggctcaactggaggggaccccttgggccctctggggcttcccctcccccacctggttggggtagagcaaaaggatggtcactcttccgaggtctccctgaaatgaatgtatttctcccccaaaagagctgatatttaatgttttaataaggatttttgagaaacaaataaccttatttataatctgggtgatccaatcattttttactcccttttgatgccatacatagaggaaagtctagcttttttggcgtgagacttttgcaatgtgcagtgggataaaatgcatttccttttctggttcgtttttcttgttaacacgcgcacacagacacacacacacaccgttccactcaccacctggacaggcgtcccccagcacggacacactggcacacaggtgcccacatctcttcctctcagcccctccacctgcctaatgttatgcaacctccttctgatgtatccaccaaaccagtactgaatgtggccgagacgttttcagtaaatcttattacctaccgtaa

SEQ ID NO: 774 - DNA, 7338 bp, Homo sapiens
agctgcaagttgggctgcaggggcagcgcatacactacaatggctgctggaaagaggcgtaaggaaacaatttccaggcccgccgcgtccagcccgaaatatgagaaaaaaattattagaaattccgcgggcggtgtagaggcggcggacgggccggagggaggatgttaaagccccgcggttgcctcttggtgctgccttggccgtatttggcacccagaatgcttcattctgtgacggtctattaataaggttgccttgctagagtttggagcagggcctcagattggccaaaatgggaaggattggattccactctcttccacgaagagtcaatgggactggctaagatcaaagtctgaggctttttccatcagtaatcagtccctttttgctttcttttacgaccacatgaaacttgagaagccacctaaagctatatcatttagtggagttgggcagttcccaagtgtccaacaagaaggcctggtttaggctgcgatggccactgtcattcctggtgatttgtcagaagtaagagatacccagaaagtcccttcagggaaacgtaagcgtggtgaaaccaaaccaagaaaaaactttccttgccaactgtgtgacaaggcctttaacagtgttgagaaattaaaggttcactcctactctcacacaggagagaggccctacaagtgcatacaacaagactgcaccaaggcctttgtttctaagtacaaattacaaaggcacatggctactcattctcctgagaaaacccacaagtgtaattattgtgagaaaatgtttcaccggaaagatcatctgaagaatcacctccatacacacgaccctaacaaagagacgtttaagtgcgaagaatgtggcaagaactacaataccaagcttggatttaaacgtcacttggccttgcatgccgcaacaagtggtgacctcacctgtaaggtatgtttgcaaacttttgaaagcacgggagtgcttctggagcaccttaaatctcatgcaggcaagtcgtctggtggggttaaagaaaaaaagcaccagtgcgaacattgtgatcgccggttctacacccgaaaggatgtccggagacacatggtggtgcacactggaagaaaggacttcctctgtcagtattgtgcacagagatttgggcgaaaggatcacctgactcgacatatgaagaagagtcacaatcaagagcttctgaaggtcaaaacagaaccagtggatttccttgacccatttacctgcaatgtgtctgtgcctataaaagacgagctccttccggtgatgtccttaccttccagtgaactgttatcaaagccattcacaaacactttgcagttaaacctctacaacactccatttcagtccatgcagagctcgggatctgcccaccaaatgatcacaactttacctttgggaatgacatgcccaatagatatggacactgttcatccctctcaccacctttctttcaaatatccgttcagttctacctcatatgcaatttctattcctgaaaaagaacagccattaaagggggaaattgagagttacctgatggagttacaaggtggcgtgccctcttcatcccaagattctcaagcatcgtcatcatctaagctagggttggatcctcagattgggtccctagatgatggtgcaggagacctctccctatccaaaagctctatctccatcagtgaccccctaaacacaccagcattggatttttctcagttgtttaatttcatacctttaaatggtcctccctataatcctctatcagtggggagccttggaatgagctattcccaggaagaagcacattcttctgtttcccagctccccccacaaacacaggatcttcaggatcctgcaaacactatagggcttgggtctctgcactcactgtcagcagctttcaccagcagtttaagcacaagtaccaccctcccacgtttccatcaagcttttcagtaggattctgggacatggattcattacagaaatgtatgtgtagctgtgccctagatgaccatttttattttagtgcctactttaaaacagtataaaaatttctgcttttgtataatacaaattttcattaagccagtataaaatagaaactagcttttaaactgagctttggaaccatttgtgttcagttaagtttacctgggtattttgtcctgattcactgccaattgtcacattttaagacttttttttttccatataggaaagccattattagtagtaaacttttacaaatcccattttcaaattacttttagatcttaaaattttcatttttgtctaataacagtggctctaccttttgacatctggctcattaaaaaatttagcaatagaatgtaaattgtataaaaagtttgtgaataactcaagggtttaaattttcttactagcttctaaatggattaataatcaagtgcttcaaatgaattaagagtccagtttcggaagataataaatgtttgttagatacaccataatttcagatcagtatattctgaagactccctgttgtctggctaaaatatttgccatctttattatgagcctttaaggaaaacaaaccctaaacacaaagcatcagtatttatagcaaaaagagactctgttaggtgacatggcatttcgtgtcacttaatagttggccctaaattagtacacaggatattttgtcgtgtttcatccttcttaacatgctatcttttcatttaataatagtaatagtgtatggcattggggtcttcagagtcgatatataggtagatctctttagtcttttccacctttcacatccaaggggtgggtcaagtgcagccagcaatttattttcattgttggcccacggttagtccataatctagagccattgtggaactgcagccatgaggtgtgtttatcccacagtggattgactcagcctctgtgggtgacagacttctaagcaggaagatagacgtgaagcacatggttacatttgggaacttgtgtagggatcatggcccctgtagccagggttaaaaactggactttttagaagtaaagtaaaagcatatcgcttatatcatttcttgctgaatttgatatgtttttctttcccttaagaatcaaaagcagaaaacaaaaacaacagtcctactccgatgttatctttctgattcaatgtgaatccatctttccttgcaatattttggatggagaatttgaagttaaatgcattagaaaactacctgatgaactaccacaaagttttaagtgactagaaatatatacagtaaaatcccactttcatgcatctctgggaaatgataggagtattgcaaataagttgagtttgtagagggtaacaaagtaaagtaaaacaaacctatcttggttaacatgaaaataacaattgagaatatattatattcactgaataattataggcttttcctcacattagacaaccaacataatcttcttaaaggtctaattaatatatttttctaagggtcagttgggacattaacctaagaaacatatctattaagcacttgttaacaccttattttaggaccctttccgttggggatgggggcaagggtgggaggtttttagaagagtatatatctctttaaaaaaaaacagaaagaaaaatatttctgagcactcattagccctatatggaaacttctttcctttttgtagggccagttatcactgcagattgcaatgtttaccaagaatttctaaaaatgagtgcagattactgaatataatacattatttaaaatatttgggagtagtataatttgtggagaaatgtaaattgtaataatgtaaatgggggcttcaatatatatatataatacacacacacacacacatgcacacataccgcacttcatagaatcaaagttgctctctgaaggagctttggctcctgatattttatcatgctcctatatttttttaatccttggagcagtagtttttatacttatgtatttaaattttattatgaaaaattacatttattaaaaaagtgtgttccaaaggcattaaaattatatatgttaataaggaagtacatttttaaatttttcaaactgctcctagcttttgattaggagaatattttttctgaaagtaggcttttcgctctgcttcattactgcttcctttagtttctatgaaacagattgcttacctaaatctttagttgaatgattagtgttcaatattgctttaatcaccatataaaaggaaaaaaattggtgacagagcacaaatagaaaacctatttttaaatagaaatcacaaatagcaagtgtggaagcactactttattctgtttaaaatgtacttaagaagtcatcaaattagtgaactgagacattggccttagtaggctgtattcactgctaatttaaaaaagggagtaccaggatttattaagtaaagcattttggaaatggggaatagcgccatatatgtatgtatgtgtatgtgtgtgtgtgtgtgtgtatatatacacacacacacacatacttaaatcttgccctgcatgaaattcaaatacatggaggcacatcttcagggcaccagtgttaaaattttggagtcttaattttcatgtgtacacctctttgcctgttcccacccccagacttgaaataacacttcagagtaagagggaattcagctaatttgtttttaaaattgactgtagtggtcactaaaccctttttgagagaatttctattaaagatgaggcagactcgcttatttgaattgcacaatgttctaacaaggatgtaacacagaattggcttttttttccctagaaaaagattgtttgtttctatgtcaactagatatgattaaaaataagtattgccaatgctgttttcattctctagtggccagaatcattatccttgaaatttctggtagtgccttagcttggttaaaaaaaaaaaaaaaaaaaaaaaaaagggattaacattaaataaaagtagtttagaatttgggcctcagacaagatattgaacctcattcagtttcacttccacatgtatgtacaagttaggtcaccaaacacggaagtgtgagtgtggaaggatcttggcactgtaagcaatgctatccattgatgtatacaagtacctttatagttatcgatcactgttaaaactttcattttaaaatcctattaccaagttcagttttttaaaacttcaattgtcctggctgattatgcatcactctgtgtgcaacttttttatttcatttagtgtttctttcaagctgtgtatttttgcctatttgttgcttgtgctttatttttcttagtcatttgtggaatatagtgatatattgtgttaatttggacagtagcggtttttaaaaaccatatactgactgaaacatgagccagagccgattgctttattaagctaataatgaatgttaaagagtacatattttcaggatcgttcatctagtgagcaatacacatattataggccaatatttttttaaaaaatagagcttggtcaacctctatactacacatattacaagatatagcactttcaaaatgaatctaaacctttacagaaactttcttataggttatgccttttattttaagacttattataattcaagtgccattagatgatatatatgtaggcctttgatatataatgctttgtgtacaaaaatggtagatggtattttaaacaggtacatttttacagtgttttcttatcaatttgctatattgcacagaatcagtgtgtgtcttttcataaggttttacaatggtttatttttttacaaggtttacgtgtctcaaagcacactgtcttcccagtacgtaagttaaaaaataccagttcacccaagttgcttctagcctactgagatccatgtgacattggaggagatcttttaaatgtttagtattcgtcattagcaatggctggctgttagttctggtaaatgtgtgcctaagttgaatttgtcttgtttttctcacactgtgtcagcagccatgtctacaacacagataagtctgttgtgatcacatagatctacataagttgtgcagttttgtgctaaaaacccatagggagctcctttgggatcatagaaaagaagatcatgcaaccagcattggtgaaggcacactcagattgcacttagggcctttctatgatgttgtcaaccctctgaggatggaaggcagtgtcttttgatgttatctagcctagaaatgacacagaactattgctaatgtataaaacacttcattatataagcttcagtggtacagatgaaccagaatgaatgtttatcttctcagaaacactccttcaatattatattggatcatgctgctaatgtaacttgggctacaactcttcatggtgctacaaacttctctgtctcattcagtcgtatttttttatccatagaaaaaggactacattaggtgtaaaagtgtacaatatatttttatactgtgacttaatttgtcattaacaaacttttacaccaccacaatgtattcatgtgcacttgcaaaaggagatctcggacatgcaaatgttaccagaacaaacccagcttttgtccacaaggtgactgtaactcagaatggaaagtgggctttataatagggtgtggagtgaagaacatgctgtatgttactaacagccctttgaatttaacaaaaactgggaatccattaggaaacggattgcatcatacctgaacataagctggactgctgaaattgtatttttagctaatgaaaaagtgtttggactagtactctaaaaatgttctaatgataaagttttgagtcaaaatagaaaagaaaaaaatctgcattccaggccgaattttgtatatttttattgcatttaaaattgctattctgtaatattgggaaatcaagtggcttatcatgtatatcgtgtacttaaaatgtattcacaaactactgttgtatttgtataaaatatagacaaagatcatattttttgtgtgtgtataagctctgtaaaatagcaatcacattatgaagctgcagtgatactacattttaaacattcacatccaaagaagcagactatttattgtccatataccagatttaaaatattaatttgctgctaattaaataatagtactgcagcttcttgtggcctacagtgttatgtttgctgtaagaataagatatgtgaattccacaaaatatatgaataaaattatagaatggcttta

SEQ ID NO: 775 - DNA, 2949 bp, Homo sapiens
gagccccgcctgcgcgcggcctcctcggcgcagccatcctcttggctgccgcgggcggcaaagcccacggcatctgccatttgtcattcagcccgtcggtaccgccccgagccttgatttagacacggctggggcgtgctctggcctcactctccgggcgggtgctggacggacggacggacggggcagccgtgctcacagctcagcagcgcggggccttggcgcgcggggcgcttccccgggtcgccgtcatggccgcggaggtggcacgcccgagcggcctcgcctgagctccgggggtcgtcgccccgcagggattgctgtcacgtctaatgtggctgctgcctcgtgtcacatctgaaactcatctgtacctcacttagaaagtggttctgattagacaagacttttcgttgcagtcgacagaaacctaatgggaccattgaagaattccaaacaggtatttgcataggaatcagaggagttaatcttgtctcttctcacaggtttgaatcttcagacaaacttctgggaggactcggtccctgcctcgcagcagatgttccctgtcactcagtaggcatatggctacccattctccccagaaatctcaccagtgtgctcactgtgagaagacgttcaaccggaaagaccacctgaaaaaccacctccagacccacgaccccaacaaaatggcctttgggtgtgaggagtgtgggaagaagtacaacaccatgctgggctataagaggcacctggccctccatgcggccagcagtggggacctcacctgtggggtctgtgccctggagctagggagcaccgaggtgctactggaccacctcaaagcccatgcggaagagaagccccctagcggaaccaaggaaaagaagcaccagtgcgaccactgtgaaagatgcttctacacccggaaggatgtgcgacgccacctggtggtccacacaggatgcaaggacttcctgtgccagttctgtgcccagagatttgggcgcaaggatcacctcacccggcataccaagaagacccactcacaggagctgatgaaagagagcttgcagaccggagaccttctgagcaccttccacaccatctcgccttcattccaactgaaggctgctgccttgcctcctttccctttaggagcttctgcccagaacgggcttgcaagtagcttgccagctgaggtccatagcctcaccctcagtcccccagaacaagccgcccagcctatgcagccgctgccagagtccctggcctccctccacccctcggtatcccctggctctcctccgccaccccttcccaatcacaagtacaacaccacttctacctcatactccccacttgcaagcctgcccctcaaagcagatactaaaggtttttgcaatatcagtttgtttgaggacttgcctctgcaagagcctcagtcacctcaaaagctcaacccaggttttgatctggctaagggaaatgctggtaaagtaaacctgcccaaggagctgcctgcagatgctgtgaacctaacaatacctgcctctctggacctgtcccccctgttgggcttctggcagctgccccctcctgctacccaaaatacctttgggaatagcactcttgccctggggcctggggaatctttgccccacaggttaagctgtctggggcagcagcagcaagaacccccacttgccatgggcactgtgagcctgggccagctccccctgccccccatccctcatgtgttctcagctggcactggctctgccatcctgcctcatttccatcatgcattcagataattgatttttaaagtgtatttttcgtattctggaagatgttttaagaagcattttaaatgtcagttacaatatgagaaagatttggaaaacgagactgggactatggcttattcagtgatgactggcttgagatgataagagaattctcgaactgcatgtattgtgccaatctgtcctgagtgttcatgctttgtaccaaatttaatgaacgcgtgttctgtaatcaaactgcaaatattgtcataaccaacatccaaaatgacggctgctatatataagtgtttgtcatatggaatttaatcgtaagccatgatcataatgttaactaaataactttatgtggcactgcctagtaagggaactatggaaaggtttggatttctccaaatctgggagaattttcaaaataagaaaataacctttatatgatatactatgactaggctgtgtatttcttttcagggatttttctaccttcagggttggatgtagtttagttactattaccatagccaacctgtagttttacatatacattttcttgtggagcaatagagttctccattttacagaagcattttaaatgtagtttgaatattttccacaagatgctgcaatgtgagttatcacttcatttatcttaaagaaagactaaactggttgtcagttacatctgacagaaaaaaaaaaaaaatcactgtgtaaccaggttaagtggtaaaataatccaggcgtcagtcaaaggcattttgctgactttaatattgattatatttttaacaggaatttaagaaaatattactggaattaaaaatatatatatattaaacaagaattttctttgctctgtctagcttaaactactactcaagctgcttaagttcttaagtattgtttgtaatcaccaataaataagtgcatttgtaattcatcagtcattattagcttttattaaaagaagattacgttttacaatgtaactataatctcttgaatttggtatcttattaatgagttttaaagatgtaaaacctaaccttttttaaagctccattgtcttatgtttttagaggcttttccgtaaacatatatcttacatataataaacttttcaaatcttgcaaaaaaa

SEQ ID NO: 776 - DNA, 5656 bp, Homo sapiens
acaatgcaccgcacaatggcccgaccgccgccactaccggggcctgagggggcctggcggagcccgagcgcggcccggcccgcagcgtggggccccgagcgcggtgaagagattgttttctgaaagctgcgttggaggctgtgacagagctgagagcctgtgtggagcggatggggaggctttctcaataacatggccctttgccattagccttgccatgaccacatttttcaccagcgtccccccctggattcaagatgcaaagcaggaggaggaagtgggctggaaactagttcccaggcctcggggccgggaggcggagagtcaagtgaagtgccaatgtgaaatttcgggaacacctttctcaaatggggagaagctgaggcctcacagcctcccgcaaccagagcagagaccatatagctgccctcagctgcactgtggcaaggcttttgcttccaaatacaagctgtataggcacatggccacccactcagcccagaaaccccaccagtgtatgtactgtgataagatgtttcaccgcaaggaccatctgcggaaccatctgcagacccatgatcctaacaaagaggccctccactgctctgagtgcggtaagaattacaatacgaagctgggctaccggcgccacctggccatgcatgctgccagcagcggtgacctcagctgcaaggtgtgcctgcagacctttgagagtacccaggccctgctagagcacctgaaggcccactcacgccgggtagcaggcggtgccaaggagaagaagcacccctgtgaccactgcgaccggcggttctatactcgtaaggatgtacggcggcacctagtggtgcacacaggccgtaaggacttcctgtgccagtactgtgcccagcggtttggccgtaaggaccacctgacgcgtcatgtcaagaagagccactcgcaggagctgctcaagatcaagacagagcccgtggacatgttaggcctactcagctgcagctccacagtcagtgtgaaggaagagctgagccctgtgctgtgcatggcctctcgggacgtaatggggaccaaggccttccctggcatgttgcccatgggcatgtatggtgcccacatccctaccatgcccagcacgggcgtgccacactccctggtgcacaacacgctgcccatgggtatgagctaccctctggaatcctcacctatctcttccccagctcagctccctccaaaataccagcttggatctacctcatacttgcccgacaaattgcccaaagtggaggtggatagttttctggcggagcttcctggaagcctgtctctctcatccgctgaaccccagcccgcctcacctcagccggcggcagctgcggccctcctagatgaagcactgcttgccaagagccccgccaacctctctgaggccctctgcgctgctaatgtggacttctcccacctactgggctttcttccactcaacctgcccccgtgtaacccacctggggccacaggaggcctggtcatgggctactcccaggctgaggcacagcccctgcttaccactttgcaagctcagcctcaagattccccaggagctgggggaccactgaactttgggcctctgcactccttgcctcctgtcttcacgtctggcctgagtagcaccaccctgcctcgtttccatcaagcattccagtagcccccacagaggccctcagctcagtttttggctctgttatggagccttagtacccaccccgtctgtgtcccccatgaaggcagctgagctttcagagctgggttcaaaaaaaaaaattccagtgtctgtatacaggagcacttggtttgggggttcaggctctaggatcgattccagaaggagccttgagccccaaccccgtgaaaagatctcataccgtaggacttcaggtattatttacttttatttttttgacctgaatcgggagccacacttggccctcttcctctccaaagcgccagaacctccttctctttggagaatggggaggcctcttggagacacagagggtttcaccttggatgacctctagagaaattgcccaagaagcccaccttctggtcccaacctgcagaccccacagcagtcagttggtcaggccctgctgtagaaggtcacttggctccattgcctgcttccaaccaatgggcaggagagaaggcctttatttctcgcccacccattcctcctgtaccagcacctccgttttcagtcagtgttgtccagcaacggtaccgtttacacagtcacctcagacacaccatttcacctcccttgccaagctgttagccttagagtgattgcagtgaacactgtttacacaccgtgaatccattcccatcagtccattccagttggcaccagcctgaaccatttggtacctggtgttaactggagtcctgtttacaaggtggagtcggggcttgctgacttctcttcatttgaggtcacatttttcccccgtggggaaataaactgactttggactgcttcagtctctgccatcttccatgactgcatttgttcctgcctgcctcggcggtatccacagaagacaggcaagaggattggagcagttttctcacaggtctgcaattctgtttttctccaagtacattatgaccccctcatccttctcttgaactggagaggggaagaaatgaaaggcatgcccacgtccgtcacctccccatcccctagtccccaccttgaacatcatgagctgttgttattagtcttggaagcagagtctgggttggtgtggatagcaaaggaggaagtctgagcccctcattggtcttcctcccacctgtcccttttccgggaagttgtggaattgttggaagaagagtttgcagaaggttaggaatgggtagatagctaagtcctaatctatgggtacattgttgtgtcccaaaccaaaattttccttatccacaatgtcccttctgtctcttccactttacagtggactcggccactgtgcataggcttctctgctctccatcaaatcacttccactttcctgtgcccccacccccgcctccagttttccgctagtatccggcaaggtttcttgcaacaaatgattagttcttttcttctgactcgtggggctccctgctgcagagagcacagcccttgcctggagcccaggaaccccatccttgcttcatctcagttcttcatgggcttcactcttcccactcacggaagggaggtagctcagggacctccactgtgggacccttgagacgcttccactctgattcagaaacacacttctacctctttactgttaactcttaacagatgcagtcagcagtttctgggcacttctctcagtaggtgcctcatgctgacttctccagtagggtttcaggacaaactaccaaggaattgcctcagcctcctaccagtcctccctcacccaccttctgtctaggttcacttggtttgtcatcaggaactgagcaggtccaggactcagctttctgcttcagcctaagccagtactccttgtttgaggtaaaagccttaaaatttagctccctagctcttgattagaagcaatttggagtaagtgtgttttgatttaggcagggtagcttgggatacctttttaaaaacaccagatattaaaatgtctggcaaggttagaatcagactagatgatttgcttctaaaaattagtttcagtgagtcccagggactaattaaggtttattttaaaaagtgtctaccttggtacgcagccacctcctgcatgctgtgcatgttattgggacttgtattataggtgatggtatgtgagaatccagttgggactcgctgttgccatcctctttgttgtatctggttttcatcactagactcagcaacccttctcaccttaactgccaccttccctacactctcagtttacagaggccactgggcctctggctgcagaatacaaagtcccgggctgttagaggagtcctttcctctctgcctgccctttcctgtccctccctcgaattctctctccccgtaagtgatgctggaaaagtcataggactggcaaagcaactgtttaaaccctttgtaaccggggccttgcccccacctcctgtcttttctccttgccttccccactcctgtgtcctcccatctatcctgtctttcctttcctcctctcagtgtcctcagcacccacaaggaattttcctatcactgtgaactttgctggtacagaggaataatatctgccttcacctttttttttttggaccatagctagccagtcatttcttaaacctcccttcctaaaatctggggggtcggggggaaagaaaaaaaaagccttagtggcctggttgttcaaaggataagaatagctttatcctgcactcagtacccgaactcacttcagtatgcttactgaggccatgagaacctgaggggcatctgcccaggacaggagccatggcatatgacaaagaccaatgagggaccaggaaaaaaagtgatgtcccctttccctgccacctccagcctctgccagcaatgagctgtccccctcccaccctacacagtagctggtcagggctgagtacagtcctgggggtaaggggatgacatgcccaggtgtcagctcaaaggatctctgcatcatcttgaggtgggaggcagggaaaggagcgccaatgaggttccctgcaacccccgccctccagcccaccgcccaaccttttacaaatggcattttcttaattgaaaatccgggaagcaggtgtgattacttttttgctcgtagatattgtcctaagttggaattctcccactgccctaaaactttccctagtagtcctttaaactcccccctccctttttggtagctgttttctccgtcctctctccacctgccctcttatctaggagctgtttgtaagcacgatttttttaacaggttatattgtacaggatcaatattttgctttttaacaaggatatttatgtaataagaaactttgccttaggcaggtgttggccagaaaagtccagattcctctgggatcccaccctggcctctcctggaactctgaacctgctgtggaaggaattggccatgaccttcacctctggagagtagggtctatggcgagggaaaagggtgttcaccatgataacctagtgcctccatagaggggtttggaaaaattccagtccgatttctttgtgtgtcagctgacttccttagctgattgttcccacttgcacctctccacctttggcactagaactcctgagacaccacttctcatgcttctccctccctaccagcggtcaaggctttggagccactcttttgtaactccagattatttaaagagaaaagtacaagacagaaatcttctagcactttgtaaacacagtgaataacctcttggagtatttttggctttatataaaacaaggtttttaattgtaaagtataagtgccattagaaaatgcacagggcatatctttgttaaagtagatttttcaatgttttacagaattacattttcaaaaaaaggtttttataatgaagttgtttattaaaaacttctgaatgatgtgtt

SEQ ID NO: 777 - DNA, 1797 bp, Homo sapiens
ggcgggtactgcgttagtgattagagtttcttccctgccggaggtgggatacacggtagcatcatggtcgaggaggtacagaaacattctgtacacacccttgtgttcaggtcgttgaagaggacccatgacatgtttgtagctgataatggaaaacctgtgcctttagatgaagagagtcacaaacgaaaaatggcaatcaagcttcgtaatgagtatggtcctgtgttgcatatgcctacttcaaaagaaaatcttaaagagaagggtcctcagaatgcaacggattcatatgttcataaacagtaccctgccaatcaaggacaagaagttgaatactttgtggcaggtacacatccatacccaccaggacctggggttgctttgacagcagatactaagatccagagaatgccaagtgaatcagctgcacagtccttagcggtggcattacctttgcagaccaaggctgatgcaaatcgtactgcccctagtggaagtgaataccgacatcctggggcttctgaccgtccacagcctacagcgatgaattcaattgtcatggagactggcaataccaagaactctgcactgatggctaaaaaagcccctacaatgccaaaaccccagtggcacccaccgtggaaactctacagggttatcagtgggcatcttggctgggttcgatgtattgctgtggaacctggaaatcagtggtttgttactggatctgctgacagaactataaagatctgggacttggctagtggcaaattaaaactgtcattgactgggcatattagtactgtgcggggcgtgatagtaagcacaaggagcccatatctgttctcttgtggagaagacaaacaagtgaaatgctgggatctcgaatacaataaggttatacggcattatcatggacatttaagtgcagtgtatggtttggatttgcacccgacaatcgatgtgttggtaacctgtagtcgagattcaactgcacggatttgggatgtgagaactaaagccagtgtacacacattatctggacatacaaatgcagttgctacagtgagatgtcaggctgcagaaccacaaattattacaggaagccatgatactacaattcgattatgggatctggtggctggaaaaacaagagtgacattaacaaatcacaaaaaatcagttagggctgtggttttacatccaagacattacacatttgcatctggttctccagataacataaagcagtggaaattccctgatggaagtttcattcaaaatctttccggtcataatgctattattaacacattgacggtaaattctgatggagtgcttgtatctggagctgacaatggcaccatgcatctttgggactggagaactggctacaattttcagagagttcacgcagctgtgcaacctgggtctttggacagtgaatcaggaatatttgcttgtgcttttgatcagtctgaaagtcgattactaacagctgaagctgataaaaccattaaagtatacagagaggatgacacagccacagaagaaactcatccagtcagctggaaaccagaaattatcaagagaaagagattttaatgaatgtggaattttttctctctctttttttttctttttaattaaaaaaaaaaaagcttggcgttcatgaggatatccagtcattttgtgctctggctgggaatataaaggagaaattcacttgcttcaatcattgctgcttcatattttacaataaactgtcccctgtcccctaaaaaaaaaaaaaaa

SEQ ID NO: 778 - DNA, 1082 bp, Homo sapiens
agatttggaggttcaacttcaacatggccgaagcaagtagcgccaatctaggcagcggctgtgaggaaaaaaggcatgaggggtcgtcttcggaatctgtgccacccggcactaccatttcgagggtgaagctcctcgacaccatggtggacacttttcttcagaagctggtcgccgccggcagctaccagagattcactgactgctataagtgcttctaccagttgcagcctgcgatgacacagcaaatctatgacaagtttatagctcagttgcagacatctatccgggaggaaatctctgacatcaaagaggaggggaacctagaagctgtcttgaatgccttggataaaattgtggaagaaggcaaagtccgcaaagagccagcctggcgccccagcgggatcccagagaaggatctgcacagtgttatggcaccctacttcctgcagcaacgggacaccctgcggcgccatgtgcagaaacaggaggccgagaaccagcagctggcagatgccgtcctggcagggcggaggcaggtggaggagctgcagctacaggtccaggcccagcagcaggcctggcaggctctacacagagaacagagggagctggttgctgtgctgagggagcctgagtgaggagaccgccagccccagaagcagagggcagtcaaggtcaagagcctgtggtccagcatgcctggcctgggcgggctacctctgagaacggctgaaatggtgcccagtccatcagcagtgatggaatttgctggaggactaggccagagcaagcctcactgccactgtgcctttggggcacccttggggttggacatacaccccctttagattcctctgtttcttctacctggataattcttggccatgttctctcttctctaggttcaggtcagctctgcccctccgcccccctcctgctggttccccagcccttttccctggccctggcttggagaatctgttttcaatctccactgattgcccccttgctggccagcccaggggcctttaccatgttctctccacatccgtaaataaacttccttcactacactgtaa

SEQ ID NO: 779 - DNA, 2254 bp, Homo sapiens
ctctccagaggcgggccctgagccggcacctcccctttcggacagctcaagggactcagccaactggctcacgcctccccttcagcttctcttcacgcactccaagatctaaaccgagaatcgaaactaagctggggtccatggagcctgcacccgcccgatctccgaggccccagcaggaccccgcccggccccaggagcccaccatgcctccccccgagaccccctctgaaggccgccagcccagccccagccccagccctacagagcgagcccccgcttcggaggaggagttccagtttctgcgctgccagcaatgccaggcggaagccaagtgcccgaagctgctgccttgtctgcacacgctgtgctcaggatgcctggaggcgtcgggcatgcagtgccccatctgccaggcgccctggcccctaggtgcagacacacccgccctggataacgtctttttcgagagtctgcagcggcgcctgtcggtgtaccggcagattgtggatgcgcaggctgtgtgcacccgctgcaaagagtcggccgacttctggtgctttgagtgcgagcagctcctctgcgccaagtgcttcgaggcacaccagtggttcctcaagcacgaggcccggcccctagcagagctgcgcaaccagtcggtgcgtgagttcctggacggcacccgcaagaccaacaacatcttctgctccaaccccaaccaccgcacccctacgctgaccagcatctactgccgaggatgttccaagccgctgtgctgctcgtgcgcgctccttgacagcagccacagtgagctcaagtgcgacatcagcgcagagatccagcagcgacaggaggagctggacgccatgacgcaggcgctgcaggagcaggatagtgcctttggcgcggttcacgcgcagatgcacgcggccgtcggccagctgggccgcgcgcgtgccgagaccgaggagctgatccgcgagcgcgtgcgccaggtggtagctcacgtgcgggctcaggagcgcgagctgctggaggctgtggacgcgcggtaccagcgcgactacgaggagatggccagtcggctgggccgcctggatgctgtgctgcagcgcatccgcacgggcagcgcgctggtgcagaggatgaagtgctacgcctcggaccaggaggtgctggacatgcacggtttcctgcgccaggcgctctgccgcctgcgccaggaggagccccagagcctgcaagctgccgtgcgcaccgatggcttcgacgagttcaaggtgcgcctgcaggacctcagctcttgcatcacccaggggaaagatgcagctgtatccaagaaagccagcccagaggctgccagcactcccagggaccctattgacgttgacctgcccgaggaggcagagagagtgaaggcccaggttcaggccctggggctggctgaagcccagcctatggctgtggtacagtcagtgcccggggcacaccccgtgccagtgtacgccttctccatcaaaggcccttcctatggagaggatgtctccaatacaacgacagcccagaagaggaagtgcagccagacccagtgccccaggaaggtcatcaagatggagtctgaggaggggaaggaggcaaggttggctcggagctccccggagcagcccaggcccagcacctccaaggcagtctcaccaccccacctggatggaccgcctagccccaggagccccgtcataggaagtgaggtcttcctgcccaacagcaaccacgtggccagtggcgccggggaggcagaggaacgcgttgtggtgatcagcagctcggaagactcagatgccgaaaactcgtcctcccgagagctggatgacagcagcagtgagtccagtgacctccagctggaaggccccagcaccctcagggtcctggacgagaaccttgctgacccccaagcagaagacagacctctggttttctttgacctcaagattgacaatgaaagtgggttctcctggggctacccccacccctttctaatttagtctctgagtcccaaaaagaagtgcaggcagagccatctgccaggcccaggagagctctgagctctggccaacaactgcagccaggctgggcagagcactccggctcacctgggctcctggcgtgtcatttgctggcttgaataaagatgtccgccttatccagtgcctgagtgtgcgagagaggcagatgcctccaaaaaaaaaaaaaaaaa

SEQ ID NO: 780 - DNA, 4071 bp, Homo sapiens
tgattcgagcgggaagaggggggtgggtgggatcggtgggggagaccatgacctccagctacgggcacgttctggagcggcaaccggcgctgggcggccgcttggacagcccgggcaacctcgacaccctgcaggcgaaaaagaacttctccgtcagtcacctgctagacctggaggaagccggggacatggtggcggcacaggcggatgagaacgtgggcgaggctggccggagcctgctggagtcgccgggactcaccagcggcagcgacaccccgcagcaggacaatgaccagctgaactcagaagaaaaaaagaagagaaagcagcgaaggaataggacaaccttcaatagcagccagctgcaggctttggagcgtgtctttgagcggacacactatcctgatgcttttgtgcgagaagaccttgcccgccgggtgaacctcaccgaggcgagagtgcaggtgtggtttcagaaccgaagagccaagttccgcaggaatgagagagccatgctagccaataaaaacgcttccctcctcaaatcctactcaggagacgtgactgctgtggagcagcccatcgtacctcgtcctgctccgagacccaccgattatctctcctgggggacagcgtctccgtacagatcctcgtccctcccaagatgttgtttacacgaggggcttcataacggattctaacggaagacactgaaaagcgccatggctacttattctgccacatgtgccaacaatagccctgcacagggcatcaacatggccaacagcattgccaacctgagactgaaggccaaggaatatagtttacagaggaaccaggtgccaacagtcaactgaggaaaaaaaataattaaacaggcctaagaagaaatcaaaaaccataagacacctatcctgctctgttatttcttcatctgctggggggaaaaagtaaattacaaacaaacaaacaaagcagaactaaaatattgggaccatggcagagaaaagcaggagaggagcaaaatgaaaattagttaacaaatgttcctcctccctctgggataccaccaccacttgtttctgtgtgtgtttattttgtttttctttcattcatgctttgcttaatgtactccaggcttcttcagataggttcagcccacccacccccatgattgtatgaagttttaaaaaaaactacagcagccaaagaaactatatatatatatatatatatatatatccagaatgattgcctctactgtcctcattgacttgtttgaaccttagtgccttaccctgtcctcttcccagttctctttatagaagctctaggagctttcgaaaagccaaagtctttctgaagaatctgtgctggacagacataattccctttctcattgtctccatctttgttggtcatggtaaggtttttccatcagcctctgaaaaaatagttgtgcacaacatctgctcactggactgtctgatccaatgtaattggctgcgtctggctaattctaagcactaaagtctacatctaagctatagatttaagcttgaagctacagattatatcactatcaccaccacccctcaccctatgcaatcaatcaatcaatcatcttaagttaaagatatttgttgtctttgaatgatttgctgtcacagactatttggtagaagaaatatttttcacctgagagaggaagagaaatttctctagtaacacaaagagtgagttctaaaaggcatgcccacatctctttcgtgccttaaggatagtgagatgcacacttatatatatactgtatatatttatatatttatatatatatttcatatatatatataatattgcaagcttaagtttgcaatttcccaaacaatacaaaaagcaaattacacaccctcaccactgttcttatctctatagtgatgaaacattaattagggatcttgctgcttttctttttctacacgaagttttcattaaagccacagaataattgatagggcagctgtttgagaacaggtcccattttcacattagggctttaaatgaattagaaactatttgaggctataaaaatgtccttgagtttggagcctgagctctggtgaaatgctgatacatctgatctatcatgggaattgcagttagagagagtaaggaataccatttagtcatctatccgttcttcacttagcaggaatatgaaagaaaggcacatgtttaagaggaatacctaaaggtttttctaaattccaacatttaaaaggcaattgtgggctatttttattttttaatattttgaaataaagtttagtgtctagggctgggagccaggactgatcttccatttctttttctttgttcccagccatgcttttgtaacttgccaggtggacttgaccaactacattaccatgctgtgcctcagtttacccatttgtaaaatgggattaataatacttacctacctcacaggggtgttgtgaggctctattcatttgctcctttattctttcctgtattctctgtatgtccagcactttgtagccatgggaggaaagggactataaaagtgtacaatgttaatggaatgatacggtacctgaaagccttgttttctagtaagaaaatgctaccttgctgtacatacttataaccttgtatttggaaatgagaaataggtttatattttcagatctctcaaaaatcacatcatttgaccaaagaataatttaagacacatagaacagatttttttaatttatattttcatcctgaccagcttagttctaataatttttagttgtgagtgattaaaaaactttggatcaattttggtcaaacatgccaactttgtagtctgagtgacaggcaaggatttttgggtttaagatgcacttttagcacacatttgtatttcccttggcatatcagattgagctaatggtgatgttatttcaatctaacagccaccaatctgaaattgtatttcaaatgttgattctgtagttctttaaataataatgaagctcatcttatacattttgctttcaccaattgattccttcttcttttagcccactattaaaacatttcttactgaatggttcatgtaggcttgctgaacagcacgcattacttgcttcctgaagagttcccccattcatccatttgtcccattagttgctgtggattatcaagttttgaaggaactgtacatcccaacagactgaaacattctaagtgaaatgagtataatccaagtaactggtgaactttggaggtttggagcttgaagagaatggctaagaagatttgaattatagggagggaacagaaatcatacatgaaaaggttttactgagaaggggaaaaccttagatagagggacatgtgaaacaaaatcatttgaaattttgattcagacatccatttccagtggcaaacagcaaagcctgaacccataaacccaaatgataggtgaagttgggtggttttatccaatgtctcaagcaagcaatgtctgggaatatcatagagtaacaagtgctggtcagccaaagaaacattcactgctggtgaaccaataccataagcatgtattatctaagcacttgatcaagaaatatacatgttgtacaagctctcaattttgttcatttattatcaaatttttaaaatacaagtttggtatgtgatttggaaaagatgccttctggatcttaagccagttgtcagtggaggtcctcagggctgcaaatgtcaagacataaccctgttcctcaccatcatgataccagatacaggtgaatacataggaactatctgcctgtgtcctcaatctcccttcaaacaagatgctgatttgtagggtacttggcaggttaaattaaaccagaagaggtgacttaataaaaaagggaatgacatttagggtataaagatctcataagaaatgtaatatgtaaattatatcttgctttatgttgtaaaatatacattgtttgcgctagaatagaaatgatttcttttcaataaaaagaaagaaggactcta

SEQ ID NO: 781 - DNA, 2928 bp, Homo sapiens
cggcggcggcggcgcggcgcagggcgcggggcggcatggccaccaccgcgcagtacctgccgcggggccccggtggcggagccgggggcaccgggccgcttatgcacccggacgccgcggcggcggcggcggcggcggcggccgcggagcgattgcatgcaggggccgcgtaccgcgaagtgcagaagctgatgcaccacgagtggctgggcgcgggcgcgggccaccccgtgggcctagcgcacccccagtggctacccacgggaggaggcggcggcggcgattgggccggcggcccgcacctagaacacggcaaggcaggcggcggcggcaccggccgagccgacgacggcggcggcggcggaggtttccacgcgcgcctggtgcaccagggggcggcccacgcgggcgcggcatgggcgcagggcagcacagcgcaccacttgggcccggccatgtcgccctcgcccggggccagcgggggccaccagccccagccgctcgggctgtacgcgcaggcggcctacccggggggcggcggcggcggcctggccgggatgctggcggcgggcggtggcggcgcggggccgggcctgcaccacgcgctgcacgaggatggccacgaggcgcagctggagccgtcgccgccgccgcatctgggcgcccacggacacgcacacggacatgcacacgcgggcggcctgcacgcggcggcggcgcacctgcacccgggcgcgggcggcggcggctcatcggtgggcgagcactcggacgaggatgcgcccagctcggacgacctggagcagttcgccaagcagttcaagcagcggcgcatcaagctgggctttacgcaggccgacgtggggctggcgctgggcacgctctacggtaacgtgttctcgcagaccaccatctgccgcttcgaggccctgcagctgagcttcaagaacatgtgcaagctcaagccgctgctcaacaagtggctggaggagaccgactcgtccagcggcagccccaccaacctggacaagatcgcggcgcagggccgcaagcgcaagaagcgcacgtccatcgaggtgggggtcaaaggcgcgctcgagagccactttctcaagtgccccaagccctcggcgcacgagatcaccggcttggcagacagcctgcagctggagaaggaggtggtgcgcgtctggttctgcaaccggcggcagaaggagaagcgcatgacccctgcggccggcgcgggccacccgcccatggacgatgtatacgcgcctggggagctagggcctggcgggggcggcgcatcgccaccctccgcgcccccaccgcccccgccggcggcgctgcaccaccaccaccaccacacactgcccggctcagtgcagtgaccccgcgggccgggcccccgccggcgcgctgcagggcgcgggcgcgcagcccgcccgcgcggcctggactctttttgttcggttgctttggattttacaaaaaaaaaaaaaagcccagaaactttcgaacaaaaccaaacacccggacgaccctctccggtgagcggcgaagacagcccggtaggctgcgtcgcccgagccccgggagagaggagcgaagatccggaactcgccaactcaccccgggcatcctgcccgccgcctgctctctgcccccatcccctcgacgacccccgcccctgcccccccgggctgttcggggccggatcccggcagcggcctccccaaagcgacaggtaacgcagtgcggggttagggattccccgggagagaggacgaagcgaggagagttctccatcccctctccccgcgtggactcctgagcctgcgggtccagggtggggggctgtcactttattcgctacacgcctcttctctcctataaggatgcgccccaccccgctttcccctttctccgggcttggttttttacggtttttatttattcgtggagcctctcggctcctggggtccttctaactccgcccgcgcccttaatttaaatcgcagtatactgtatttatcggggccccggaggggaggtcgcgagagccgcgtctgtgtataaaagcaggaaatagccaaagctttaatctagcctaatttatttttccccttatatttccctaccctaccctccccccaaaaaaaagcaaaaaaaaaaaaaaaaaactaacaaaaaaaattcgagtgttcatttttcgtttcgtttcatccgagccccggcttggttcccggccacgccggaggggtctgcgctcccacacacccagacgggaaggggcttctgccctgctgcagaccgaccgccgcatagcgcggcccctgctccccgcggggccctgccctcctggccacaccaaacgaaacttggaaaagttagagagattgttttttaaccagctgtagaaataagccgttccctgagaaccctccgcctgattccctgcagcttccctctgctccctttccagcccgccgggatgcgggatgccaggggaggccgggagagaaattccccaagtttggggtgaggtgggaaccatgtaaatatgtgagatatgtacacactggcggggagaagaaacattttgtgcttggtttttatttttggttttccgggttacccttccttcctaccctaaaggattttgtacactgactaatccgaaaaagatattttaatatgatttccgaatttctgacccatctctatttattttctggatgtgtttggagcttcccccttctccgtttcttcttctgtttgttaaggtttgaatttaaattttgttattttatttttattattttttgaaacaatgtttcggtgcattctctttgtatctttattgaaaaaaaaataatgtagactgggaagttccctttatatttatgttatagtaaatattttatt

SEQ ID NO: 782 - DNA, 4172 bp, Homo sapiens
agtaatagcaggagcagcaacagaaggcgtcggagcgggcgtcggagctgcccgctgtgggagagagaggagacagaaagagcgagcgaggagagggagcccgaggcgaaaaagtaactgtcaaatgcgcggctcctttaaccggagcgctcagtccggctccgagagtcatggcgaccgcagcgtctaaccactacagcctgctcacctccagcgcctccatcgtgcacgccgagccgcccggcggcatgcagcagggcgcggggggctaccgcgaagcgcagagcctggtgcagggcgactacggcgctctgcagagcaacggacacccgctcagccacgctcaccagtggatcaccgcgctgtcccacggcggcggcggcgggggcggtggcggcggcggggggggcgggggcggcggcgggggcggcggcgacggctccccgtggtccaccagccccctgggccagccggacatcaagccctcggtggtggtgcagcagggcggccgcggagacgagctgcacgggccaggcgccctgcagcagcagcatcagcagcagcaacagcaacagcagcagcaacagcagcaacagcagcagcagcagcagcaacagcggccgccgcatctggtgcaccacgccgctaaccaccacccgggacccggggcatggcggagcgcggcggctgcagcgcacctcccaccctccatgggagcgtccaacggcggcttgctctactcgcagcccagcttcacggtgaacggcatgctgggcgccggcgggcagccggccgggctgcaccaccacggcctgcgggacgcgcacgacgagccacaccatgccgaccaccacccgcacccgcactcgcacccacaccagcagccgccgcccccgccgcccccgcagggtccgcctggccacccaggcgcgcaccacgacccgcactcggacgaggacacgccgacctcggacgacctggagcagttcgccaagcagttcaagcagcggcggatcaaactgggatttacccaagcggacgtggggctggctctgggcaccctgtatggcaacgtgttctcgcagaccaccatctgcaggtttgaggccctgcagctgagcttcaagaacatgtgcaagctgaagcctttgttgaacaagtggttggaggaggcggactcgtcctcgggcagccccacgagcatagacaagatcgcagcgcaagggcgcaagcggaaaaagcggacctccatcgaggtgagcgtcaagggggctctggagagccatttcctcaaatgccccaagccctcggcccaggagatcacctccctcgcggacagcttacagctggagaaggaggtggtgagagtttggttttgtaacaggagacagaaagagaaaaggatgacccctcccggagggactctgccgggcgccgaggatgtgtacggggggagtagggacactccaccacaccacggggtgcagacgcccgtccagtgaactcgagctgggggaggggcagagcgcggggctccccctccccttcggtccttggccctttcccggccctcttgttccctctctaacttctgattgttcttttatttttaattattatttccccgtcccttaaaaagacaaaaaaaataaggcaaaaggaaagcaactaagacactggactatcctttaaaggtagcaggtgtaatgatgtgttttgacctttgcaggcgagtaaccaggcaatggagtggagtgtctcctggagagagtgaggagagtgtgtgatagctagaaagagagagagacagagagatggcaagcactgagataaatacctggcaaaactaaataaattaccaaaaaggaaaaaaaatccaccaaaccatgataaacacaaaatgcagcttcctgatgcttagagttggcacatgctgctgtgtttatttattgtggattcccatcaggaaagaggaaaaaatacacatgttctttcatataggcaaaatttaaccacataaatttgcactgcaagaaaattgaagtttacgtgaacaaattcatgagcatattttctctttctccccaccgttaatttgggagttgccgttttgggggattttgttttgctttgctttattcatcggagagagttgaagccagctcttggccactctccatttctaatgttcttgtgttgccccttcttcgtactgtttgtgaactttggttaccttcacattccccttacgagggtgtaacatctatttgttcctcttaccaaagcaaaaggattggcttcatacaaaatagacaattctctgatttcaggaaatgtgcatggtctacccgctttatcgaaggcaagaatccggtttggaatataaaaataagcattggttgttcttaccagccacaaagtaaacttcattttcaggcagtgtttctgggggaggttatggagggaagaaaaaagaaaaatcgatagtgagtgactgattgcttcattttatcaggcgggcccattgtgaaagagctcaggggaaatgtggaggttaaatatatttccagagttgtccagcagaaagaaagtggcactttgaagagaactagggaagtacatatcttcagatatccctatatagttctctaccttcagttttagtaacaattatgaagaattatttgtgctgacagcagcagttaaactttgtttctctaatagctttttttttacataaaaaaagacccaggaacttaatagtgtatgcataagactgtgttttttagcacacagatacccacagcatacactgacgatctccacgcagtagacaggttttgtcttcactagctcatttgtttatcaagtcatatttagggtcccacaccctcttttcctgtaatttattgcagaatacaccactttgacttggacagctttctgccccctctttcactaaggaaggcaaatgaagtgaaaaaaaaaaatgccattttcaatccttcctttctcccctttgttaatagttttaagtgaatttttgaccttatcttaatggaaaacggttaactccaaacacaaaagactctactggaaagtgtaggtgaaaaaacttgtaactgtattgaaaataaataccattaaactgtgatcagttaaaatttaaaagaaaaatcagcacaaaagggcgctaaaagggaaaacactttttattaatcttaaaagtttgggggtttttttccagttaggtattagataaatttttattttaaaaaatgaaagtctcactaccataaaattatggttcagcatcagattagcattgcactcagtagtctttaaggttttaggaaatatgctttatattgtcttttcaaacacctgtgattgtttcattttccatgtttttgcaagataaatggtgacttataatgggcatatttatttgcctgtatttcatttcccccaatgaatgtcacaaggagatgggcacggagctgcttcgggtgcatcacgctgctcgttcctgaggtatgggaactggcctttagtgaagctatccagagcagggcaaatagccactggtaaagggaggaaatgaatttccagatacttattaccaagtaggtaaggtcagaagctggagttcagagaatgtgtctacagcttctctgactcttataggtttactaagatgaaagttaccactgaaccttaccactatgtatatatgtttaatatctgtcttttgaaatgcagaaatagtttaaatgtttctttgtctatttttctttttttttaatgctacccagggaaatattttcatatcatttttaagtggcctgcctcaatgtatatttatttcttttgaaacaaaaaggttctggaaactgtttttctgtagctttaaatgaataggtgagcaaaatctatatgggatgtaatttttttgttcagtctcttaaaaaatactttgttttggtacatttggttgtgcttgtggggaaaataaaaacgcagagatccttatatatttatgttaaagtaatattttattatctacataaaacagaaatgcacaataaaaaaaaaaaaaaaaaaaaaaaaaaaaaaaaaaaaaaaaaaaaaaaaaaaaaaaaaaaaaaaaaaaaaaaaaaaaaaaaaaaaaa

SEQ ID NO: 783 - DNA, 1503 bp, Homo sapiens
atggccacggcggcttctaacccctacctgccggggaacagcctgctcgcggccggctctattgtgcactcggacgcggcaggggctggcggcggcgggggtggcggcggcggcggcggcgggggcggcgcagggggcgggggcggcggcatgcagccgggcagcgccgccgtgacctcgggcgcctaccggggggacccgtcctctgtcaagatggtccagagcgacttcatgcagggggccatggccgccagcaacggcggccatatgctgagccacgcgcaccagtgggtcacagccctgccccacgccgccgccgccgccgccgctgccgccgccgccgccgtggaggcgagctcgccgtggtcgggcagcgccgtgggcatggctggcagcccccagcagccaccgcagccgccgccgccaccgccgcagggccccgacgtgaagggcggcgccgggcgcgacgacctgcacgcgggcacagcgctgcaccaccgcgggccgccgcacctcggacccccgccgccgcccccacaccagggccaccctgggggctggggggcggccgccgctgccgcagccgcagccgccgccgccgccgccgccgcgcacctcccgtccatggccgggggccagcagccgccgccgcagagtctgctctactcgcagcccggaggcttcacggtgaacggcatgctgagcgcgccaccggggcccggcggcggcggcggcggcgcgggcggtggagcccagagcttggtgcacccggggctggtgcgcggggacacgccagagctggccgagcaccaccaccaccaccaccaccacgcgcatcctcacccgccgcacccgcaccacgcgcagggacccccgcaccacggcggcggcggcggcggcgcggggcctggactcaacagccacgacccgcactcggacgaggacacgccgacgtcggacgacctggagcagttcgccaagcagttcaagcagcggcgcatcaagctgggcttcacgcaggccgacgtggggttggcgctgggcacactctacggcaacgtgttctcgcagaccaccatctgccgcttcgaggccctgcagctgagcttcaagaacatgtgcaagctcaagccgctgctgaacaagtggctggaggaggcggactcaagcaccggcagccccacaagcatcgacaagatcgcggcgcagggccgcaagcgcaagaagcggacctctatcgaggtgagcgtcaagggcgcgctggagagccacttcctcaagtgccccaagccctccgcgcaggagatcaccaacctggccgacagcctgcagctcgagaaggaggtggtgcgggtctggttctgcaatcggcgccaaaaggagaagcgcatgacgccgcccgggatccaacagcagacgcccgacgacgtctactcgcaggtgggcaccgtgagcgccgacacgccgccgcctcaccacgggctgcagacgagcgttcagtga

SEQ ID NO: 784 - DNA, 1507 bp, Homo sapiens
agatgtcaaaggctgaagctgctccctttgccacattataactagtaggggatcctcaccgaccatggccacagctgcctcgaatccctacagcattctcagttccacctccctagtccatgcggactctgcgggcatgcagcaggggagtcctttccgcaaccctcagaaacttctccaaagtgattacttgcagggagttcccagcaatgggcatcccctcgggcatcactgggtgaccagtctgagcgacgggggcccatggtcctccacactggccaccagccccctggaccagcaggacgtgaagcccgggcgcgaagacctgcaactgggtgcgatcatccatcaccgctcgccacacgtagcccaccactcaccgcacactaaccaccccaacgcctggggggccagcccggcaccgaacccgtctatcacgtcaagcggccaacccctcaacgtgtactcgcagcctggcttcaccgtgagcggcatgctggaacacgggggactcaccccacctccagctgccgcctctgcacagagcctgcacccggtgctccgagagcccccggatcacggcgaactgggctcgcaccattgccaggatcactccgacgaggagacgccaacctctgatgagttggaacagttcgccaaacaattcaaacaaagaagaatcaagttgggcttcacgcaggccgacgtggggttggcgctgggcacactgtatggtaacgtgttctcgcagaccaccatctgcaggttcgaaggcttgcagctgagcttcaaaaatatgtgcaagctgaagcccctgctgaacaagtggctggaggaggcggattcgtccacagggagcccgaccagcattgacaagatcgctgcacagggccgcaagcgcaagaagcggacctccatcgaggtgagtgtcaagggcgtactggagacgcatttcctcaagtgtcccaagcctgccgcgcaggagatctcctcgctggcagacagcctccagttggagaaggaagtggtgcgtgtctggttctgtaatcgaagacaaaaagagaaaagaatgactccgccaggggatcagcagccgcatgaggtttattcgcacaccgtgaaaacagacacatcttgccatgatctctgactggaggaagcgaggaggcggccggccgcactgggagcagcgcggatttctctttctctctcactctcttcctttcattctagtattctttattatttttctctctctctcgttcgctcgctctctcgtactctctctcttttccctcctttcctttttctttcctttcccctttttctttcccttctttttccctttcctttcctttcattttctttcctttccccttcccttcccttcccttccatctcttcctttcctttcctttcttttcttttgctttcctttcctttttttcccttttctttccttttcataagaggttctaacttctgttgacaaaggaaacacatactc

SEQ ID NO: 785 - DNA, 3817 bp, Homo sapiens
gcggggctagagctgtcggagaagcgggaccgcgaggccggcgcgcggcgctctgcgcggtcagagggagcgcctggcagcagcaggagcagcagcagcagcccgcggcggggccgccgccagccgccgcgaccgccgcggctgcagcctccgaagggaggccgggtgagccggcgtacgcactttcccgcggactttcggagtgtttgtggatatacatgccaagccgccacgatgatgtccatgaacagcaagcagcctcactttgccatgcatcccaccctccctgagcacaagtacccgtcgctgcactccagctccgaggccatccggcgggcctgcctgcccacgccgccgctgcagagcaacctcttcgccagcctggacgagacgctgctggcgcgggccgaggcgctggcggccgtggacatcgccgtgtcccagggcaagagccatcctttcaagccggacgccacgtaccacacgatgaacagcgtgccgtgcacgtccacttccacggtgcctctggcgcaccaccaccaccaccaccaccaccaccaggcgctcgaacccggcgatctgctggaccacatctcctcgccgtcgctcgcgctcatggccggcgcgggcggcgcgggcgcggcggccggcggcggcggcgcccacgacggcccggggggcggtggcggcccgggcggcggcggcggcccgggcggcggccccgggggaggcggcggtggcggcccggggggcggcggcggcggcccgggcggcgggctcctgggcggctccgcgcaccctcacccgcatatgcacagcctgggccacctgtcgcaccccgcggcggcggccgccatgaacatgccgtccgggctgccgcaccccgggctggtggcggcggcggcgcaccacggcgcggcagcggcagcggcggcggcggcggccgggcaggtggcagcggcatcggcggcggcggccgtggtgggcgcagcgggcctggcgtccatctgcgactcggacacggacccgcgcgagctcgaggcgttcgcggagcgcttcaagcagcggcgcatcaagctgggcgtgacgcaggccgacgtgggctcggcgctggccaacctcaagatcccgggcgtgggctcactcagccagagcaccatctgcaggttcgagtcgctcacgctctcgcacaacaacatgatcgcgctcaagcccatcctgcaggcgtggctcgaggaggccgagggcgcccagcgcgagaaaatgaacaagcctgagctcttcaacggcggcgagaagaagcgcaagcggacttccatcgccgcgcccgagaagcgctccctcgaggcctacttcgccgtgcagccccggccctcgtccgagaagatcgccgccatcgccgagaaactggacctcaaaaagaacgtggtgcgggtgtggttttgcaaccagagacagaagcagaagcggatgaaattctctgccacttactgagggggctgggaggtgtcgggcgggacagaatggggagctgaggaggcatttttggggggctttcctctgcttgcctcccctcggatttggagtgtccgttatcctgcctgcatttggggagtcccttctcgctctctttcctccacccattctctgattttcctgcctttgctgtcccctagccttgaggactggggtgctgggtgtggggattggagtatagggtaggggagaagggggggagcattcgggggagtggggagtggggggaaggaaagcggagacccgagcaggggttttaaggagcaggatggttctggggtttgggtggggggagacgcgggaagggtaggaaaatggactgtttctgaccagagacacttacctaaatatcctggggaccaaggaactatgtacaaaaacaaacctaccaaccaccaaaaactagacaaataaagacaaactaaaacaaaacagaacaaaagcaaaggaaaatgctttagaaattttaactccggggagccataatctgcaacttcattttcccccatagaagagaaaaaagagcaccaccattattaccacctccccaaccctacacgcacgaactgagtcgaaaaacgaaaaccaaacgagcgagaagttgaagttctgggtatcaaagctagttgttctgtctgcgtgtttaatttttccctctctcacctccaccccatccatatcctctttatttcctccgttccaatgagaggcctatggctgctctccaatcccgggaagtgagtgggagcacagctgaaaagagagggtcagggggaggctggctgcttgcttaggtggaatccaagttttcccgtggccctgcctatactctggtggcctggtcctgttggggtgggggtctttggagagaagggcatagtctttgagctactaaaaagcagaattccggagcttcgagatatcttattctaggaaaatgaaacaattttaacaacagttttttttcctcttatgtcgaagatctagttttagacaatttcaaaataagcttttcccactcatagaactttaacttgccctttcagttttatcttttttttagagagaggtttaaactactgatttttcctgttgattcaaatagactaatggggtgaaagttattaggagagatactctctcctgttttctccactgaacgagactcatcttgctcttctaggtcccgtttcttcctctcttggaggacatgaaattatagaaatgttgagaagttcctgctttcttttgcggtaggacttggctgtgagaaaatcacctaaatcccagaaaagaggaagacagatttaaagtgcccccacccccatttgtttcaaagaggtctgcatgttgggcgaaaacagaacaactgtgtttccttttacttgttcttattattcaagagtcatttattacaggggataaatgttgggtagcaagaactttaatttgcactaccagtctcccaaatagaaaatcatgtatagtatttcatagtaataatcaggtaccttacaagctgctggtggattttaaaaaattaagatagttgaaggtggttaggtaaaatgcctgctttgtgtacaagatactctttggatctctcgtagagatggtttgttaccatcctttaatcataactaaaacattgaaaacagaacaaatgagaaaagaaaaaaaacctgccgattaacaagactgaaatcatgcatgatctgaaaggtgtggaaagaaacacaattaggtctcactctggttaggcattatttatttaattatgttgtatatcattgtttgcagggcaaacattctatgcatttgaaactgagcactaaactgggctagctttctggtagaccgttttgtggctagtgcgatttcacagtctactgcctgtttccactgaaaacatttttgtcatattcttgtattcaaagaaaaaggaaaaaagattattgtaaatattttatttaatgcacacattcacacagtggtaacagactgccagtgttcatcctgaaatgtctcacggattgatctacctgtccatgtatgtctgctgagctttctccttggttatgttttttctcttttacctttctcctcccttacttctatcagaaccaattctatgcgccaaaatacaacagggggatgtgtcccagtacacttacaaataaaacataactgaaagaagagcagttttatgatttgggtgcgtttttgtgtttatactgggccaggtcctggtagaacctttcaacaaacaaccaaacaaaaa

SEQ ID NO: 786 - DNA, 3141 bp, Homo sapiens
agtttcgggtgccgaggtctgcagctagcggcaagcggagtcaggcatccgttcagactgacagcagaggcggcgaaggagcgcgtagccgagatcaggcgtacagagtccggaggcggcggcgggtgagctcaacttcgcacagcccttcccagctccagccccggctggcccggcacttctcggagggtcccggcagccgggaccagtgagtgcctctacggaccagcgccccggcgggcgggaagatgatgatgatgtccctgaacagcaagcaggcgtttagcatgccgcacggcggcagcctgcacgtggagcccaagtactcggcactgcacagcacctcgccgggctcctcggctcccatcgcgccctcggccagctcccccagcagctcgagcaacgctggtggtggcggcggcggcggcggcggcggcggcggcggcggaggccgaagcagcagctccagcagcagtggcagcagcggcggcgggggctcggaggctatgcggagagcctgtcttccaaccccaccgagcaatatattcggcgggctggatgagagtctgctggcccgcgccgaggctctggcagccgtggacatcgtctcccagagcaagagccaccaccaccatccaccccaccacagccccttcaaaccggacgccacctaccacactatgaataccatcccgtgcacgtcggccgcctcttcttcatcggtgcccatctcgcacccttccgcgttggcgggcacgcaccaccaccaccaccatcaccaccaccaccaccaccaaccgcaccaggcgctggagggcgagctgctggagcacctgagtcccgggctggccctgggcgctatggcgggccccgacggcgctgtggtgtccacgccggctcacgcgccgcacatggccaccatgaaccccatgcaccaagcagcgctcagcatggcccacgcgcacgggctgccgtcgcacatgggctgcatgagcgacgtggacgccgacccgcgggacctggaggcattcgccgagcgcttcaagcagcgacgcatcaagctgggggtgacccaggcagatgtgggctccgcgctggccaacctcaagatccccggcgtgggctcgcttagccagagcaccatctgcaggttcgagtccctcacactgtcccacaataatatgatcgcgctcaaacccatcctgcaggcatggctcgaggaggccgagaagtcccaccgcgagaagctcaccaagcctgaactcttcaatggcgcggagaagaagcgcaagcgcacgtccatcgctgcgccagagaagcgctcgctcgaagcctactttgccattcagcctcggccctcctctgaaaagatcgccgccatcgcggagaagctggacctgaagaaaaacgtggtgcgcgtctggttctgcaaccagaggcagaaacagaaaagaatgaaatattccgccggcatttagaagactcttggcctctccagagacgcccctttcctcgtccgctcttttctctcctctcttctgcctcttttcacttttggcgactagaaacaattccagtaaatgtgaatctcgacaaatcgaggactgaagagggagcgaacgagcgaacaactgagcccaagccggtgagaatgtgaaacagtttctcaaaggaaagaataacaaaagatggtatttgtctgttgtagcaaagttgtccctttgaaccccacctcggcttcttcagaggaagtgtggagatggctgtttgcaggaaggcagacgagacagtgtttaaaaagtccacaagaatgatcaagtaagatttgtttttattcttacagacatcacccgtgttcaagtttaaaagtacactttgcaactatttttcagaaatagaaattgattcaggactaaaactttaaactagagttgatgcttaatgtgatagagacatctctaaagtattttgaattttaaaaaaagatggcagattttctgcatttacactgtatattatatatatatttttattgtggttcttacccccttttccttctctgaagtgttaatgcttaagaaaagagttgcgcctgctgtgttcactgatcttgaaagctattattagattattgcagaacaaccctctgtaaattattaatttatctctctagcaacttaattttgtgcacattctaattaattaaacttcttccgtctaaaaaaagtgggggaaatgtatagctagtaacgttcaaaaaattttgtttgatgagtttaccgaatttttacagctttcctcctatactgtgttccttttgacccatttgtatattctcacttgaatgaagattgtttttttctttgtttttactggtagtgttctgatttgtgagtcgacactcagtaatggatgtcttaatcgtgtagacctgattcactgtctgaagtattgtttacttcgttacatatttaatggggattcccacattgtccccatgacacatgagcgctctcacttacccttacacacacacacacacacacacacacctctaacagaagggaagaagcagttggaagcatgaccgatgcaccattttctagttttaggtgcatttgccacttggtgtttgcccttcagattttagatttcaccaaggtatttcagtcttccagttttcaattgctttgttggctacatgttaatatttataggaatacttcagtttttccttttggaggtttgtttgtagaaaaactaatttgaactataagaaagacagtgcactgcttgtaaattcacattgtttggaaaaattcttttggaacaaaaaattaggtacatgataactggtaccttatctactgtaaatatttcattaaaaatgatgcacacatagatatattcttacaaattttgctgtattgctgttctctttgaggctctccaaagtcttgagttctgtatatggcctggtttcttgtttttattaatagatggtttatttactatggtaatgtattaatttatttttggtgttgttcgattgtctttcattgaagagataattttaatgttttattggcaacgtatgctgctttttcattaaaatatgctattaaaattaaatggctttta

SEQ ID NO: 787 - DNA, 1182 bp, Homo sapiens
cgctgagcagcgctcacttggagagcggcaagcaagctagacaagcctgattccatgtcacccgctgccaccctgccaggagcgcgaagatgatggccatgaactccaagcagcctttcggcatgcacccggtgctgcaagaacccaaattctccagtctgcactctggctccgaggccatgcgccgagtctgtctcccagccccgcagctgcagggtaatatatttggaagctttgatgagagcctgctggcacgcgccgaagctctggcggcggtggatatcgtctcccacggcaagaaccatccgttcaagcccgacgccacctaccataccatgagcagcgtgccctgcacgtccacttcgtccaccgtgcccatctcccacccagctgcgctcacctcacaccctcaccacgccgtgcaccagggcctcgaaggcgacctgctggagcacatctcgcccacgctgagtgtgagcggcctgggcgctccggaacactcggtgatgcccgcacagatccatccacaccacctgggcgccatgggccacctgcaccaggccatgggcatgagtcacccgcacaccgtggcccctcatagcgccatgcctgcatgcctcagcgacgtggagtcagacccgcgcgagctggaagccttcgccgagcgcttcaagcagcggcgcatcaagctgggggtgacccaggcggacgtgggcgcggctctggctaatctcaagatccccggcgtgggctcgctgagccaaagcaccatctgcaggttcgagtctctcactctctcgcacaacaacatgatcgctctcaagccggtgctccaggcctggttggaggaggccgaggccgcctaccgagagaagaacagcaagccagagctcttcaacggcagcgaacggaagcgcaaacgcacgtccatcgcggcgccggagaagcgttcactcgaggcctatttcgctatccagccacgtccttcatctgagaagatcgcggccatcgctgagaaactggaccttaaaaagaacgtggtgagagtctggttctgcaaccagagacagaaacagaaacgaatgaagtattcggctgtccactgattgcggcagggcgcagcgtcgggagccgggagagcctagtgctcatccctcccgggttcgggggatggttatcggg

SEQ ID NO: 788 - DNA, 1411 bp, Homo sapiens
ccttcgcaagccctcatttcaccaggcccccggcttggggcgccttccttccccatggcgggacacctggcttcggatttcgccttctcgccccctccaggtggtggaggtgatgggccaggggggccggagccgggctgggttgatcctcggacctggctaagcttccaaggccctcctggagggccaggaatcgggccgggggttgggccaggctctgaggtgtgggggattcccccatgccccccgccgtatgagttctgtggggggatggcgtactgtgggccccaggttggagtggggctagtgccccaaggcggcttggagacctctcagcctgagggcgaagcaggagtcggggtggagagcaactccgatggggcctccccggagccctgcaccgtcacccctggtgccgtgaagctggagaaggagaagctggagcaaaacccggaggagtcccaggacatcaaagctctgcagaaagaactcgagcaatttgccaagctcctgaagcagaagaggatcaccctgggatatacacaggccgatgtggggctcaccctgggggttctatttgggaaggtattcagccaaacgaccatctgccgctttgaggctctgcagcttagcttcaagaacatgtgtaagctgcggcccttgctgcagaagtgggtggaggaagctgacaacaatgaaaatcttcaggagatatgcaaagcagaaaccctcgtgcaggcccgaaagagaaagcgaaccagtatcgagaaccgagtgagaggcaacctggagaatttgttcctgcagtgcccgaaacccacactgcagcagatcagccacatcgcccagcagcttgggctcgagaaggatgtggtccgagtgtggttctgtaaccggcgccagaagggcaagcgatcaagcagcgactatgcacaacgagaggattttgaggctgctgggtctcctttctcagggggaccagtgtcctttcctctggccccagggccccattttggtaccccaggctatgggagccctcacttcactgcactgtactcctcggtccctttccctgagggggaagcctttccccctgtctccgtcaccactctgggctctcccatgcattcaaactgaggtgcctgcccttctaggaatgggggacagggggaggggaggagctagggaaagaaaacctggagtttgtgccagggtttttgggattaagttcttcattcactaaggaaggaattgggaacacaaagggtgggggcaggggagtttggggcaactggttggagggaaggtgaagttcaatgatgctcttgattttaatcccacatcatgtatcacttttttcttaaataaagaagcctgggacacagtagatagacacacttaaaaaaaaaaa

SEQ ID NO: 789 - DNA, 4715 bp, Homo sapiens
aggatcaagggaatcgtggctgcctgccccactgagcccactgccccaaccccctctccttcttgtgccagatcccttgggattggagccgctgtgagcagtggctaggcatttgagcacctctgtctctgccttgctccatagcagctgctgtgctgaacaccgctcttccggcaccggtacaagctgccgcaccagtacaggcctcctcgacggcccaaccccggccaccagcccagccccagacgctgttccagacccagccgctgctgcagaccacacctgccatcctcccgcagcccactgctgccaccgctgctgcccctacccccaagccagtggacacccccccacagatcaccgtccagcctgcaggcttcgcatttagcccaggaatcatcagtgctgcttccctcgggggacagacccagatcctggggtccctcactacagctccagtcattaccagcgccattcccagcatgccagggatcagcagtcagatcctcaccaatgctcagggacaggttattggaacccttccatgggtagtgaactcagctagtgtggcggccccagcaccagcccaaagcctgcaggtccaggccgtgaccccccagctgttgttgaacgcccagggccaggtgattgcgaccctggctagcagccccctgcctccacctgtggctgtccggaagccaagcacacctgagtcccctgctaagagtgaggtgcagcccatccagcccacaccaaccgtgccccagcctgctgtggtcattgccagcccagctccagccgccaagccatctgcctctgctcctatcccaattacctgctcagagacccccaccgtcagccagttggtgtccaagccacatactccaagtctggatgaggatgggatcaacttagaagagatccgggagtttgccaagaactttaagatccggcggctctcgctgggccttacacagacccaggtgggtcaggctctgactgcaacggaaggtccagcctacagccagtcagccatctgccggttcgagaagctagacatcacacccaagagtgcccagaagctaaagccggtgctggaaaagtggctaaacgaagctgaactgcggaaccaggaaggccagcagaacctgatggagtttgtgggaggcgagccctccaagaaacgcaaacgccgcacctccttcaccccccaggccatagaggctctcaatgcctattttgagaagaacccactgcccacaggccaggagatcactgaaattgctaaggagctcaactacgaccgtgaggtagtgcgggtctggttctgcaatcggcgccagacgctcaagaacaccagcaagctgaacgtctttcagatcccttagggctcagcccctggccctgtgttctagcactttgtccatttcccgtggcatccggctgcagccactgccatgacagcacctgtcattttgccacgtgcagctgtgctcaccccaggtcatcagactccaccgtgtgcatgtgcatcaatgtccctcttttctcccacacatctcacatcatggggaggccagagggggccacacgagagctccaggctctgggctggtcactccgaagaagaggatttgtgacgtcacttagagaagcaccttgctagcatggtttctgaagggtgaattctggtggggaaccagaaactccctgtctttggggcagggctaaagcagctcctaaggaccactggccattagctcttgcttttgatggcattctctttccaccttgtcttctcctttgctcctctgtgttagtgtggcaggtatgacaactcatccagtggaaacacagcctcacactgcccttccgccccccacactttgcctgcaggtgcaccgaaaggacctgggagataaaattcaaaaaagtgtgatgtgctgctcagaaggtcagactccatgtctgccttgacctcaaggtcagaaggttcccaaacccctggggctggaacatgggatctcctcttccacctcttcctggttcctttgcggggaaaattgcactaaaacagaaccttttcttaatccatgttggaaggaagcaacagtgaactctacctgttctggagttctcctgggtctgcagaaggttgggaatttagaaaataaggctgttctttcatattttaatttaatctctgtcaatggccatccctcccacaaaaaaacgtgggttaagagaacttgcagactggatatgcaagcaaacgggcaactctggagaaaaataaggaaaggaatgctgactttctctttctttctcttgtccccacacccattcccaacccaatactggggccttctcaaaaggagcaaattaaacaataaaccagacagcaaggccctgggggaaaggacaacatcctgaaataaatgatggagcccaggaaggtctcttgtggaagttgacttaactctaattttctttgtaactttaagccttggatacgggaggagaaatctcattttgtcgagtctcagaccatgtctgtgtgtaagcaatccccacagtgtcctctgagccaaggacacccccagatcagattgagttttgcttctagacggggtagctatggtaccttgggggttagctctcatccaagctgttaagtgagtttccagcctcactgtggctggaaagcccctaaaattcagtatgtaactccaggaagtcaggagagaactgagatttgcctagatgaccacaggcttgcggtgtagattatccctaaagggccccaagtcacgggggtcaaccacccctgtcttcagtactcttatccttacagaggctggtctctaacagctgcctccagtggacctcccatgatccaccctgagggaaggaccgtcagctggggacacatcaccacctctgtcagtcactggtgcagagccacctcctagcctagcttcctctggtgtcctgtttcctttcccacttactgttggtgcctcccaggccctgcagtgccagcgtggccaccctcttggtagcctggccagtaagaggaggacagttgtgtgctgaattagcacacgcacgtgcagcgcgcacagacgcgcgcacacacacacacatacacgctctgctgcatttggacaaaccatgcctgccagagtgtagcagaggtgaggaagcaggtgggcagcttgcctgacccagcttttcaggagagcgtgtctccaacagagagtctccacactctagttcagggttatcgacctgcctcaatgagatgacagactcatttgggaggggtgttgcaaacaagttttcagtgagaatagttaagttccagagcttgtaaaggattcagtgactgacacttcagtaaattaggccaggcacattggcttatgcctgtaattccaacactttggaaggccgaggtgggcggatcatttgaggtctggagttcgagaccagcctgaccaacatggtgaaaccccgtctctactaaaaatacaaaaattagccaggtgtggtagtgcacatctgtaatcccagctacttgggaggtggaggcaggagaattgcttgaaccctggaggttgcaatgagctgagatcacactacttcactccagcctgggtgacagagcaagactcggtctcaaacaaacaaaaacttatggcgatgcaggttttcatgctcagacgcttgcattcaggtatgctttcttttttgagagagacaaatgggtcacagctggcaccctgggaatagcacataatccagggtgtgtctgtggtggtggacgtgcaggggaacaccatctgtcctgtgtcatgatgggaaaacaatcatgaaccactggtctaaattaggcctggccatgctttctcagcccctccctcatttaaatttgtcttcccaaagctgagctaaaactaaaccatttctcctctgctggaatgatggattggtcattcagaggaacaataccaggggtgggaggtttgcaggctgagttccccaggcatgggggtgcagggtgtccctgaggtttacccaaagcacagctcgctggcctgtgacctctgcccttcctcccacagtgtaagaccccccaggaagcagctggggcctgaacctctcacctaggaggtaggtttattttattttttgttagcatcaggctctgaaggagttggtatacattttgttttgaaaacatcttctggacttacaccagagcttagtgtcgtctttactatggaaagagaggagaatggacagaaatggtttaactgtgtggagttttgtttgttttgttttaaatggaagaaagaccaaaactttcctggtggatcagctagggcctttgaccctgcattaccacggcattttatccaggtgaagtccagggaaagaactcagccaaatggactaaggaacacacgagtttggaatgcgagactctgacatttttgtgttcttggaaatccaattaccttcccatgcccagatttccttcctgcctcttggaccaggctctggcactgaggttctcactgttcccaacacagacaaagcttcctgagggctggaggggcagcaaggggagaggagaatggggaagaagcgcttgatgtagttgtgtggaataaacagtattttttcttttgtaaaaaaaaaaaaaaaaa

SEQ ID NO: 790 - DNA, 10049 bp, Homo sapiens
gcgccgcctccttcggcgttcgccccacggaccggcaggcggcggaccgcggcccaggctgaagctcagggccctgtctgctctgtggactcaacagtttgtggcaagacaagctcagaactgagaagctgtcaccacagttctggaggctgggaagttcaagatcaaagtgccagcagattcagtgtcatgtgaggacgtgcttcctgcttcatagataagagtagcttggagctcggcggcacaaccagcaccatctggtcgcgatggtggacacggaaagcccactctgccccctctccccactcgaggccggcgatctagagagcccgttatctgaagagttcctgcaagaaatgggaaacatccaagagatttcgcaatccatcggcgaggatagttctggaagctttggctttacggaataccagtatttaggaagctgtcctggctcagatggctcggtcatcacggacacgctttcaccagcttcgagcccctcctcggtgacttatcctgtggtccccggcagcgtggacgagtctcccagtggagcattgaacatcgaatgtagaatctgcggggacaaggcctcaggctatcattacggagtccacgcgtgtgaaggctgcaagggcttctttcggcgaacgattcgactcaagctggtgtatgacaagtgcgaccgcagctgcaagatccagaaaaagaacagaaacaaatgccagtattgtcgatttcacaagtgcctttctgtcgggatgtcacacaacgcgattcgttttggacgaatgccaagatctgagaaagcaaaactgaaagcagaaattcttacctgtgaacatgacatagaagattctgaaactgcagatctcaaatctctggccaagagaatctacgaggcctacttgaagaacttcaacatgaacaaggtcaaagcccgggtcatcctctcaggaaaggccagtaacaatccaccttttgtcatacatgatatggagacactgtgtatggctgagaagacgctggtggccaagctggtggccaatggcatccagaacaaggaggcggaggtccgcatctttcactgctgccagtgcacgtcagtggagaccgtcacggagctcacggaattcgccaaggccatcccaggcttcgcaaacttggacctgaacgatcaagtgacattgctaaaatacggagtttatgaggccatattcgccatgctgtcttctgtgatgaacaaagacgggatgctggtagcgtatggaaatgggtttataactcgtgaattcctaaaaagcctaaggaaaccgttctgtgatatcatggaacccaagtttgattttgccatgaagttcaatgcactggaactggatgacagtgatatctccctttttgtggctgctatcatttgctgtggagatcgtcctggccttctaaacgtaggacacattgaaaaaatgcaggagggtattgtacatgtgctcagactccacctgcagagcaaccacccggacgatatctttctcttcccaaaacttcttcaaaaaatggcagacctccggcagctggtgacggagcatgcgcagctggtgcagatcatcaagaagacggagtcggatgctgcgctgcacccgctactgcaggagatctacagggacatgtactgagttccttcagatcagccacaccttttccaggagttctgaagctgacagcactacaaaggagacgggggagcagcacgattttgcacaaatatccaccactttaaccttagagcttggacagtctgagctgtaggtaaccggcatattattccatatctttgttttaaccagtacttctaagagcatagaactcaaatgctgggggtaggtggctaatctcaggactgggaagattacggcgaattatgctcaatggtctgattttaactcacccgatgttaatcaatgcacattgctttagatcacattcgtgatttaccatttaattaactggtaacctcaaaattcgtggcctgtcttcccattcaccccgcttttgactattgtgctcctttataattctgaaaactaatcagcactttttaacaatgtttataatcctataagtctagatgtatccaaaggtgaagtatgtaaaaagcagcaaaatatttatttcaaagacttcacttctgtttcctgaatctaaagaaagacaacatgctgctttttaatcataggatggagaattttaaagaactgtttgggccaggcacagtcgctcatacttgtaatcccagcactttgggaggccgaggcgggtggatcacaaggtcagcagatcgagaccatcctggccaacatggtgaaaccctgtctctactaaaaatacaaaaattagccgggtgtggtggcacatgcctgtaatcccagctactcgggaagctgaggcaggagaattgcttgaaccagggagttggaggttgcagtgagctaagactgcaccactgcactccagcctggtgacagaacgagactctgtcttaaaaacaaacaaacaaaaaaaaaatctgttagataagctatcaaaatgcagctgttgttttgtttttggctcactgttttcgtggttgtaactaatatgtggaaaggcccatttccaggtttgcgtagaagagcccagaaaacagagtctcaagacccccgctctggactgtcataagctagcacccgtggtaagcgggacgagacaagctcccgaagcccgccagcttcctgctccactcagctccgtccagtcaacctgaacccacccagtccagctgtctgtgggaatggtggtgttcttagggacagactgacaccttacttgtcagtgttcctccgggccccatttggcagctcccgtatcttttgttatgttgcttttaaagatatgatgttttattgttttaactcttggtgacagtagatgctctctggagcgcagacgaggcacatgtgtcttcatagcctgggctgggtgggagccagtcaccctgcggatcgagagagggggtagagtcttcttcaaatggcagttttacttcaaatggcagatttcacaagagttggttattttttacaatggtttaggttgttaagtctcctttgtatgtaaggtagttttttcaacatctaaaatttttgttttagccttcaaaaccaacttaccaacctcagtccagctgggaaggcagcgttgattatggtagtttgtcaagaatatatggacctggaaacactttctctctctgtccacctggtagataaattgtcctgttgagaatttttagatctggactggaactgccaggaccaccgcctccagggagtcgctgggcacctggaggtatcgtcgatgcctctcccccatctttagaaaatttggctcttctgaggtcattattattttaagaatgattaggattgataagggtcccatgaccagcattatgaaaatgcgagagtgggaaggacacagtgtgagacttccactagaaaaaagtgaaagttagggttaggacatccttttttaaaaattacaaatttagtccgttttggtttttgtaatcaggctaggcacagtggctcacacatggaatcccagcactttgggaggccgaggtgggaggatcacttgagcccaggagttcgagaccagcctaggcaacatagcaagaccctgtctgtacacaaaatttaaaaattagttcatcggggtggcacacatcagtagtcccagctactctgcaggctgaggtgggaggattgcttgaacccaggaggtcgaggctgcagtgagctgtgatctcaccactgcattccagcctgggtgacagagttagattccaccctctcccaccccggcaaaaaaaaaaaaaaaagatgcaatcaaaggggctgttggccagcaatggcagcagcagcggcgggcagtctgcccaagtgtcttaggaaccaaaagcaaataaaagtgtttccatatatgccaccagccaagtggccatcctaattcagaaagaagctagcctttgagtgtctgtcatggtgcatccgtttcagtattatttcctaaaatgagaagcccctgtgtcaacaagatccaggggctggagcccaatgccaagcctgtgttgtccccagcgaccctgcagctgctcgctctgatgtaccctgtgccattcaaggagatgtggtccaggaaagtgagcctcatggttttcagagaagtcattgttctgtttacattttcataaaacctgtttaaaatagctccccgtctcaggctttcagcagtaacagtgagctgactggcaagttcgatgttagctcccgggacactcagcagcgatggtgagcattttggtttccttaaggcccagcaagacttccagggacatctctggtgaagccagaatggagacacccgtgacctcaggctgaaagtcactcgacattggtctcttgtgttgatagggaaggaaatcaggcattcctatttctttaaataacaaaaccactaattgccactcaatgctggaatattttgggtcacctaatcatagatttctcagggcatcaatactcaaatataggctgattatgccccagttcaaatgggaactattaacagagtgcatttcttgcttgctgggtttcaacagacatcagccaaaagaacaaaagagatgtcaggacagattccaggagtgtcggagcacatgtgtggcacccgctccctctggcagcgaatgtaggaagtcgccaaatttacccactcttcaacaagtcattgtttaaacacggtttttcattttctcaacttttaatagcaaaaagtgccaaagtcctcagagacctaacagccttggtctaccgtgctgaccagggtgaaggcacggcgagggactcctcccagacgtgcctcttgtgtgccagctggctgtggctcgggagcagacgcaggcctctccattgtccaggggagcctggcggcgcatccctcctctcccacctcctggcacttccagctgggtgtcccacatgttggattccgtccccaccacacttccagagaccggagaactgtgcagggcctaaggccgtttggatgaattgtcaaaacaagatgcttccagttacagcggcaggagcgggactgggagcacgggctgacggctgctggtgcctttcttcccacctcgcttgcctgtttccgcttgacccttcctccagctccgatgagaagagtataaagcatcttcctaacgggtgtgtttgctatacgaacataatggacgtgaagtggggcagaaacccagaactcagcattcaaggatgcccaggagagctgtccctgttttaaagagctgtgttttgttttgtttcgcatttagagagcagacaaggcacccttctgctgcgctgatacgtttcttacactgggccattttagacccccagggaaacagccttcctggagcgttgtctggaggttccagggacagggcagcctcccagagccgagcaagagctcaaggtacaaatgagagatttgctataccgtgagaagtcaacaacttagccaccacttccccgcaatggaccatgtaacaaatacctcagcaggccctgcaaaaggccatgctagagctgaggcgcacagcctgtggcctctgtagttagggcaggtgggatggagactccttgagtgcacacacctgagcctgcccacacacaggggagcagcatctcgtatgacgtctggaaggaacttcggttgtgtaaagggagccttgaagatacgtgcaaaaggtgctaccccaatttggtgaaactgacattgggcacgtcttgggcttaggagaagcggccgatggtcccggcctgcagtgacaaacccccctccccgcaccgcccccagcaccccctctcctcttcacctcttcctgctggccacgaggaagccacttcctcagagagaccctaccagatgcggatggaaacagatgcaccaaagcaagccctgatgaaaccgcgacttcctaaggtctgtctcctctgaacttgcacctgggcctctctgtgtttggttccaagcacttcccacctcaaactcccattttcaaaccactgtatctctgcgcacatctgctacttaccagccgcatacatgatggagggttttttggtcctgatccagtggccacacctgtctttgaaatgtctcactgaactccagttttaaaatagattcattgcttcaacacagcaagcccaatgcacccagctaagactggcttgaccgacagcctggcctttggtggggggcttcctggggcctggggaaagctggccaccttcaacagctggtacctcttcaacagtgtggcctttcaaaatgcagatgccaccaggagaacatgcccacagctcaccacctatggatgccatggctctgggcagctttcaaagcaggttcctgtggtctcctcagctgtttgagggggtaacagcaaatcagcctccattttaaaatgaaaacaccagcctccagatgtagggcctgctgggtgttgctagccgctggtccccaggcacggtgcactttctccacctcctgcagcctccctgttgtttctagactcttgcacctggtgagtgcaaggataggtgacccaggggcctgcagccttgtcctcagctcccatctcctggactgccagcctcaccctctgcagttagcatggttggcctgatgcagggatcccgagggattactttttagaccttctttcacattcagaaaagtagtatagattcaggagaggcaagaaaattatgctgtccatagaagtcacccatgaagactgatgccaccacctgaaggctcatgattgttaaaaatgtccacgggaacctctcgtccacaggaggtttgtctcaacacttcccatttttacggcattggcattgccaagcatggggaagtatctgctcttctcatgttaaaagtggcccagcttttcttaactcagtccaagctgacttgtttagctgcactggaatttcttaccaaccaaatatttgcatcgagcaaagggggctgtgtgcacctccctaatggcagcgatgatggctgctgtcattcaagcccatcttcagacgtcacagtctggaagtgaaatgtccacaaacatctgtggcagaaaaggctatacggaccacccagttgtgctgcagctttacagagcaaggaagggttgtggcaaataaatgattaacctgcctcgactgtgctgagggcaacaaaggccatctcaccaaaggattattcgatgccattaaatcatcccgtgaccttcctgcttccgagtccatggcctttgcccagggcatgtactcccctgagaggccttctgcctagaaagatctatgactgggttccaaagttgaggcctaggtttttgctgggatttagatattttcaggcaccattttgacagcattcaggaaaacggttattgaccccatagactagggtaagaataaaggcaataaatttggtctgactcagaatataggagatccatatatttctctggaaaccacagtgtacactaaaatgtgaaattgaaggttttgttaaaaagaaaaagataatgagcttcatgctttgtttaattacataatgatttccattacgctatttctgtgaaatgcagcaggttcttaaacgttatttcagtggcatgggctggaagcttatcacaaaaagccatgtgtgtggccttatcagaacagaaagagacaggctggtgcccaaggctgctgcctgctccaccttttgccagctctggacatctgaggacgtcccggcagatctggaatggggccctcaactgaccatttgcttctcagaatttcagtttgagacatgagaggtataatcagttacttttctccccccagagaaacccttttgtgaggggagaggagctatggtatgtggttcagctgaaacacatacaactgcatccttttggagtcctttgccaacaaaaacagaccaacagaccagatggtgtccatgttcaatatcatgtcttgatggacgcagctgatgacctcaaatacttgagtggtctcatggctgttagatggattatttgaaaaaaaaaaaaaaaaaagagagaaaaaataattgatttttacatcagagatagcaaactaagacctggggaggggggtcagcttttattttattttattttttttaagtttgctagttgggtcaaatgtgaggaggagggagtctacctgccacctcttctcttgcccctcttctgcccacacatccagcatccaaaatccattcatttaatgaattgataaagtgccgtgcaaactggtgcacaaacaggcccccagtccacgcagcctggctcctaggaaaagtggtgaccgggcgtgggggggcatgccgcagccctgggacacagtcgggcaccttccccggacccccaggccttggctgtgcctcaagtcagagagggtcagccttcaggccccggagacgagtgactggccgatcatttcacaataaaatcactcacttttggcaacttcactttttttaaggcacagtcagttccttttctcatgtacctcacaaaagatgaagaccatgtagtactctttttggtaaagttacagtgttcatgttaaatatcacttttttctacattgtgtggtaaaaagaactacgttaatagctatatcttaaatactgtgatttgactttttgaaaaatatcctaatacaaatattttactaacttacaatcactcatttaataagaaacatttggattcttttgaaatcagtgttaattgactcatattcttaaaagcctggctcttgaccctattggaaacacaaaggaagctgaaatcaaacatctaaaatacactgcgtacacgtgtgcgtgcacacacacacacacacacacacacacacagctcttcatttctcctgagccatgcagaatttactttcaatgtggaaatctgttccctttaccacactgtatatgcacagagcacaagagaggctatctctagtcacttccaccagcgaggccttagactccgtattagaggccaccgatttcatacaacagtgtttcgctaaagacccttcactattcttgtttagtaaatagctgtctgctcttcagggaactgttacctatgggttattaccaaagaacgctggcaattggaaatgtcctgatggaaattctttgcacgtgccggttctctggcatcctccaggtggcccaacccaaagcagaaagcagaaaccacagaccccgtgagtctccccataccttgtttccaataacttggcaaaacttcttggtgcatattggttacaccctctgggattcataatgccattaggctaaaaccctaagagagagggttgacagaaacacacgcgagaatgaggcagatcccagagcaaggactgggcccagactctccacatgtgctctactagtgagtgccttatactctcagtattttggggcttacagcttcttatttgtgctaaaaaggtgcagttccaaagtaggaactgccacacaggccccagcatcctctctccaacttcatacctctctcctggtggggggagcgggcatccaggacctccggaatcaaggatgtgcagagaagagcgaaagtaatttttctagtcacatgaactgattggttccaggcaattagaaaatggctataaaataaccttaattttaaaaaaaaatcttgggtcttcgttttcctattaggagactgaactgaccacatgtattgatttatatcctgaatatatgggaacttctgtgtttgggatgtcctactgtaagactgatgaatgtacagagttaatttcagggtacagttttgccttaatggttttaaaaaataaactattttttaaaatttt

SEQ ID NO: 791 - DNA, 8148 bp, Homo sapiens
gcgaattttgggaagttccgttggggaagatggcggcggcctcgagcacccttctcttcttgccgccggggacttcagattgatccttcccgggaagagtagggactgctggtgccctgcgtcccgggatcccgagccaacttgtttcctccgttagtggtggggaagggcttatccttttgtggcggatctagcttctcctcgccttcaggatgaaagctcagggggaaaccgaggagtcagaaaagctgagtaagatgagttctctcctggaacggctccatgcaaaatttaaccaaaatagaccctggagtgaaaccattaagcttgtgcgtcaagtcatggagaagagggttgtgatgagttctggagggcatcaacatttggtcagctgtttggagacattgcagaaggctctcaaagtaacatctttaccagcaatgactgatcgtttggagtccatagcaagacagaatggactgggctctcatctcagtgccagtggcactgaatgttacatcacgtcagatatgttctatgtggaagtgcagttagatcctgcaggacagctttgtgatgtaaaagtggctcaccatggggagaatcctgtgagctgtccggagcttgtacagcagctaagggaaaaaaattttgatgaattttctaagcaccttaagggccttgttaatctgtataaccttccaggggacaacaaactgaagactaaaatgtacttggctctccaatccttagaacaagatctttctaaaatggcaattatgtactggaaagcaactaatgctggtcccttggataagattcttcatggaagtgttggctatctcacaccaaggagtgggggtcatttaatgaacctgaagtactatgtctctccttctgacctactggatgacaagactgcatctcccatcattttgcatgagaataatgtttctcgatctttgggcatgaatgcatcagtgacaattgaaggaacatctgctgtgtacaaactcccaattgcaccattaattatggggtcacatccagttgacaataaatggaccccttccttctcctcaatcaccagtgccaacagtgttgatcttcctgcctgtttcttcttgaaatttccccagccaatcccagtatctagagcatttgttcagaaactgcagaactgcacaggaattccattgtttgaaactcaaccaacttatgcacccctgtatgaactgatcactcagtttgagctatcaaaggaccctgaccccatacctttgaatcacaacatgagattttatgctgctcttcctggtcagcagcactgctatttcctcaacaaggatgctcctcttccagatggccgaagtctacagggaacccttgttagcaaaatcacctttcagcaccctggccgagttcctcttatcctaaatctgatcagacaccaagtggcctataacaccctcattggaagctgtgtcaaaagaactattctgaaagaagattctcctgggcttctccaatttgaagtgtgtcctctctcagagtctcgtttcagcgtatcttttcagcaccctgtgaatgactccctggtgtgtgtggtaatggatgtgcaggactcaacacatgtgagctgtaaactctacaaagggctgtcggatgcactgatctgcacagatgacttcattgccaaagttgttcaaagatgtatgtccatccctgtgacgatgagggctattcggaggaaagctgaaaccattcaagccgacaccccagcactgtccctcattgcagagacagttgaagacatggtgaaaaagaacctgcccccggctagcagcccagggtatggcatgaccacaggcaacaacccaatgagtggtaccactacaccaaccaacacctttccggggggtcccattaccaccttgtttaatatgagcatgagcatcaaagatcggcatgagtcggtgggccatggggaggacttcagcaaggtgtctcagaacccaattcttaccagtttgttgcaaatcacagggaacggggggtctaccattggctcgagtccgacccctcctcatcacacgccgccacctgtctcttcgatggccggcaacaccaagaaccacccgatgctcatgaaccttcttaaagataatcctgcccaggatttctcaaccctttatggaagcagccctttagaaaggcagaactcctcttccggctcaccccgcatggaaatatgctcggggagcaacaagaccaagaaaaagaagtcatcaagattaccacctgagaaaccaaagcaccagactgaagatgactttcagagggagctattttcaatggatgttgactcacagaaccctatctttgatgtcaacatgacagctgacacgctggatacgccacacatcactccagctccaagccagtgtagcactcccccaacaacttacccacaaccagtacctcacccccaacccagtattcaaaggatggtccgactatccagttcagacagcattggcccagatgtaactgacatcctttcagacattgcagaagaagcttctaaacttcccagcactagtgatgattgcccagccattggcacccctcttcgagattcttcaagctctgggcattctcagagtaccctgtttgactctgatgtctttcaaactaacaataatgaaaatccatacactgatccagctgatcttattgcagatgctgctggaagccccagtagtgactctcctaccaatcatttttttcatgatggagtagatttcaatcctgatttattgaacagccagagccaaagtggttttggagaagaatattttgatgaaagcagccaaagtggggataatgatgatttcaaaggatttgcatctcaggcactaaatactttgggggtgccaatgcttggaggtgataatggggagaccaagtttaagggcaataaccaagccgacacagttgatttcagtattatttcagtagccggcaaagctttagctcctgcagatcttatggagcatcacagtggtagtcagggtcctttactgaccactggggacttagggaaagaaaagactcaaaagagggtaaaggaaggcaatggcaccagtaatagtactctctcggggcccggattagacagcaaaccagggaagcgcagtcggaccccttctaatgatgggaaaagcaaagataagcctccaaagcggaagaaggcagacactgagggaaagtctccatctcatagttcttctaacagaccttttaccccacctaccagtacaggtggatctaaatcgccaggcagtgcaggaagatctcagactcccccaggtgttgccacaccacccattcccaaaatcactattcagattcctaagggaacagtgatggtgggcaagccttcctctcacagtcagtataccagcagtggttctgtgtcttcctcaggcagcaaaagccaccatagccattcttcctcctcttcctcatctgcttccacctcagggaagatgaaaagcagtaaatcagaaggttcatcaagttccaagttaagtagcagtatgtattctagccaggggtcttctggatctagccagtccaaaaattcatcccagtctggggggaagccaggctcctctcccataaccaagcatggactgagcagtggctctagcagcaccaagatgaaacctcaaggaaagccatcatcacttatgaatccttctttaagtaaaccaaacatatccccttctcattcaaggccacctggaggctctgacaagcttgcctctccaatgaagcctgttcctggaactcctccatcctctaaagccaagtcccctatcagttcaggttctggtggttctcatatgtctggaactagttcaagctctggcatgaagtcatcttcagggttaggatcctcaggctcgttgtcccagaaaactcccccatcatctaattcctgtacggcatcttcctcctccttttcctcaagtggctcttccatgtcatcctctcagaaccagcatgggagttctaaaggaaaatctcccagcagaaacaagaagccgtccttgacagctgtcatagataaactgaagcatggggttgtcaccagtggccctgggggtgaagacccactggacggccagatgggggtgagcacaaattcttccagccatcctatgtcctccaaacataacatgtcaggaggagagtttcagggcaagcgtgagaaaagtgataaagacaaatcaaaggtttccacctccgggagttcagtggattcttctaagaagacctcagagtcaaaaaatgtggggagcacaggtgtggcaaaaattatcatcagtaagcatgatggaggctcccctagcattaaagccaaagtgactttgcagaaacctggggaaagtagtggagaagggcttaggcctcaaatggcttcttctaaaaactatggctctccactcatcagtggttccactccaaagcatgagcgtggctctcccagccatagtaagtcaccagcatataccccccagaatctggacagtgaaagtgagtcaggctcctccatagcagagaaatcttatcagaatagtcccagctcagacgatggtatccgaccacttccagaatacagcacagagaaacataagaagcacaaaaaggaaaagaagaaagtaaaagacaaagatagggaccgagaccgggacaaagaccgagacaagaaaaaatctcatagcatcaagccagagagttggtccaaatcacccatctcttcagaccagtccttgtctatgacaagtaacacaatcttatctgcagacagaccctcaaggctcagcccagactttatgattggggaggaagatgatgatcttatggatgtggccctgattgggaattaggaaccttatttcctaaaagaaacagggccagaggaaaaaaaactattgataagtttataggcaaaccaccataaggggtgagtcagacaggtctgatttggttaagaatcctaaatggcatggctttgacatcaagctgggtgaattagaaaggcatatccagaccctattaaagaaaccacagggtttgattctggttaccaggaagtcttctttgttcctgtgccagaaagaaagttaaaatacttgcttaagaaagggaggggggtgggaggggtgtagggagagggaagggagggaaacagttttgtgggaaatattcatatatattttcttctccctttttccatttttaggccatgttttaaactcattttagtgcatgtatatgaagggctgggcagaaaatgaaaaagcaatacattccttgatgcatttgcatgaaggttgttcaactttgtttgaggtagttgtccgtttgagtcatgggcaaatgaaggactttggtcattttggacacttaagtaatgtttggtgtctgtttcttaggagtgactgggggagggaagattattttagctatttatttgtaatattttaaccctttatctgtttgtttttatacagtgtttcgttctaaatctatgaggtttagggttcaaaatgatggaaggccgaagagcaaggcttatatggtggtagggagcttatagcttgtgctaatactgtagcatcaagcccaagcaaattagtcagagcccgcctttagagttaaatataatagaaaaaccaaaatgatatttttattttaggagggtttaaatagggttcagagatcataggaatattaggagttacctctctgtggaggtattgacttgtaatctcattttcctttcaaaaaaaaaaaaaaaagctaaggtggcttgttgggatgtaaacatgttttcagatgcagtaaggtttagtgtaggacagccttcctgacccagtggcatgaaaaccattacaggattaatagttctcctacttccacaatgtgccaaaagtctgcatcccagcattttgtttgcaggagaactgatgccattcctaagagctggactcactgtttctcttcatcacaaggagaaggagtccaaactttaatcactccactgtatgctccctgagataaaacagtaaaaaatccgcagccatagttcacttaaaacaatttcaagctcacttttgaagtaatgggggcctggaatgctaggtgagcatgaagataaacccttgctactatgtagcaacccaattggacctttttggagaaataggtctgagtctggattctgggggacatcaataagagcccttcacataaaaatatagaaatccaggagactgtttcgagtgcaacagaagttctcagtatttggagggtcctctcaaaaattctgcggccttactttgatattgacacctgcactgtgccattcctgattattccattcaggatctgtatcagcgggatggggcatggtccccagcacaactcttctgggttaaaaaaaaaaagccaggtgattcctttgtgtgttatgtcgtaagtggagtgacttcatcatatatggaagaagatttctatattcagctttttctgcaggttggagtcagcatagagttggaaaatcagctttggctttctttcctgtctcatttcctctagtgttctcctttttattgtcatcagctctcaacaactctgccacttttgtgtcccaaggtaataagatgtaggaaacaaaacattgtaaagtggagcaagaaaagttatcaattaaccacatcagagtcaaatgtcttgggtgacactaaggaggatatgggcaggtgataccagagtgctttatcttgtgatgttgatacagtagcagcctctcagacattcagccaggttggatttctcatgagtttgtcacctagttttgaatcctatcccgttggtttctgcaggaaaaaaaaaaaaatttatgtggtttttaaaatttgttctgagtggggagaatcttagggggaatgtactgaatagtatcatgggctcagctcccccatgcagggccaacaaataccaaaatgagtaaactgggaagcttttctctctttctgtcttcatcccagatcaaagaatcccgagttaggatctggatgaaggataagcccctgaattgtcgatgggctcacccccacactgacccagcatctgaacttgcttaacagggagccggggctaaactgcttcaccctgcctgagaaccagggagcactgcatttctccacagggtggaggagaagaggcagaataaaccaagcctgggacacctccctcctgtctaggtgtactcattcttctgtttcaaaagaaggcaaggacatgaagtcaacttctacctatcttctgctgctggtgtcttatgtattctcagtttgacctgattcctcttctgtcttttgacttaacattaggggttcttggtcataacctgctctgatgtacataaagatttcaggttcaatatcaatgtgtcttaaaacagaagtattttagcgggtggggggtggggtggtggggacaaacaacgcaggatataattgccaaaaccaggcttgaggttggtgactcttgaaagattttctttcttcaggcctagatcagaaaattaagtgcagcaatatcatgaattctcagaagccctttcagggagccagtgagtcatacagtatccacagttgagtcacttaaagatgtcagtatacgaaacattattcacaatccttgggcaatctcatttttttttccttctcccctcctcccctgccccccatacatttctatccttgagttagttttggaggggcaggaagtacttaacatctcagaagctagattgggaaacatgctcagctataagaactgagctttaaattttgagtttaaaaatgtacatcaggagcagctggggagggtctttttttaaaaaaatctttcaaatttggttttctgtgcatatggccgttttgtaaatactttggggtttttcatttttttgaaagtagatgaaatctgttgtgggatttttttcccgaaacattacaaaataacctgtttatttacatgcaaataaacttctttgataaaaagtaa

SEQ ID NO: 792 - DNA, 3749 bp, Homo sapiens
gcggagcgtgtgacgctgcggccgccgcggacctggggattaatgggaaaagttttggcaggagcgggagaattctgcggagcctgcgggacggcggcggtggcgccgtaggcagccgggacagtgttgtacagtgttttgggcatgcacgtgatactcacacagtggcttctgctcaccaacagatgaagacagatgcaccaacgaggctgatgggaaccaccctgtagaggtccatctgcgttcagacccagacgatgccagagctatgactgggcctgcaggtgtggcgccgaggggagatcagccatggagcagccacaggaggaagcccctgaggtccgggaagaggaggagaaagaggaagtggcagaggcagaaggagccccagagctcaatgggggaccacagcatgcacttccttccagcagctacacagacctctcccggagctcctcgccaccctcactgctggaccaactgcagatgggctgtgacggggcctcatgcggcagcctcaacatggagtgccgggtgtgcggggacaaggcatcgggcttccactacggtgttcatgcatgtgaggggtgcaagggcttcttccgtcgtacgatccgcatgaagctggagtacgagaagtgtgagcgcagctgcaagattcagaagaagaaccgcaacaagtgccagtactgccgcttccagaagtgcctggcactgggcatgtcacacaacgctatccgttttggtcggatgccggaggctgagaagaggaagctggtggcagggctgactgcaaacgaggggagccagtacaacccacaggtggccgacctgaaggccttctccaagcacatctacaatgcctacctgaaaaacttcaacatgaccaaaaagaaggcccgcagcatcctcaccggcaaagccagccacacggcgccctttgtgatccacgacatcgagacattgtggcaggcagagaaggggctggtgtggaagcagttggtgaatggcctgcctccctacaaggagatcagcgtgcacgtcttctaccgctgccagtgcaccacagtggagaccgtgcgggagctcactgagttcgccaagagcatccccagcttcagcagcctcttcctcaacgaccaggttacccttctcaagtatggcgtgcacgaggccatcttcgccatgctggcctctatcgtcaacaaggacgggctgctggtagccaacggcagtggctttgtcacccgtgagttcctgcgcagcctccgcaaacccttcagtgatatcattgagcctaagtttgaatttgctgtcaagttcaacgccctggaacttgatgacagtgacctggccctattcattgcggccatcattctgtgtggagaccggccaggcctcatgaacgttccacgggtggaggctatccaggacaccatcctgcgtgccctcgaattccacctgcaggccaaccaccctgatgcccagtacctcttccccaagctgctgcagaagatggctgacctgcggcaactggtcaccgagcacgcccagatgatgcagcggatcaagaagaccgaaaccgagacctcgctgcaccctctgctccaggagatctacaaggacatgtactaacggcggcacccaggcctccctgcagactccaatggggccagcactggaggggcccacccacatgacttttccattgaccagcccttgagcacccggcctggagcagcagagtcccacgatcgccctcagacacatgacacccacggcctctggctccctgtgccctctctcccgcttcctccagccagctctcttcctgtctttgttgtctccctctttctcagttcctctttcttttctaattcctgttgctctgtttcttcctttctgtaggtttctctcttcccttctcccttgccctccctttctctctccaccccccacgtctgtcctcctttcttattctgtgagatgttttgtattatttcaccagcagcatagaacaggacctctgcttttgcacaccttttccccaggagcagaagagagtggggcctgccctctgccccatcattgcacctgcaggcttaggtcctcacttctgtctcctgtcttcagagcaaaagacttgagccatccaaagaaacactaagctctctgggcctgggttccagggaaggctaagcatggcctggactgactgcagccccctatagtcatggggtccctgctgcaaaggacagtgggcaggaggccccaggctgagagccagatgcctccccaagactgtcattgcccctccgatgctgaggccacccactgacccaactgatcctgctccagcagcacacctcagccccactgacacccagtgtccttccatcttcacactggtttgccaggccaatgttgctgatggccccctgcactggccgctggacggcactctcccagcttggaagtaggcagggttccctccaggtgggcccccacctcactgaagaggagcaagtctcaagagaaggaggggggattggtggttggaggaagcagcacacccaattctgcccctaggactcggggtctgagtcctggggtcaggccagggagagctcggggcaggccttccgccagcactcccactgcccccctgcccagtagcagccgcccacattgtgtcagcatccagggccagggcctggcctcacatccccctgctcctttctctagctggctccacgggagttcaggccccactccccctgaagctgcccctccagcacacacacataagcactgaaatcactttacctgcaggctccatgcacctcccttccctccctgaggcaggtgagaacccagagagaggggcctgcaggtgagcaggcagggctgggccaggtctccggggaggcaggggtcctgcaggtcctggtgggtcagcccagcacctgctcccagtgggagcttcccgggataaactgagcctgttcattctgatgtccatttgtcccaatagctctactgccctccccttcccctttactcagcccagctggccacctagaagtctccctgcacagcctctagtgtccggggaccttgtgggaccagtcccacaccgctggtccctgccctcccctgctcccaggttgaggtgcgctcacctcagagcagggccaaagcacagctgggcatgccatgtctgagcggcgcagagccctccaggcctgcaggggcaaggggctggctggagtctcagagcacagaggtaggagaactggggttcaagcccaggcttcctgggtcctgcctggtcctccctcccaaggagccattctgtgtgtgactctgggtggaagtgcccagcccctgcccctacgggcgctgcagcctcccttccatgccccaggatcactctctgctggcaggattcttcccgctccccacctacccagctgatgggggttggggtgcttcctttcaggccaaggctatgaagggacagctgctgggacccacctccccctccccggccacatgccgcgtccctgccccgacccgggtctggtgctgaggatacagctcttctcagtgtctgaacaatctccaaaattgaaatgtatatttttgctaggagccccagcttcctgtgtttttaatataaatagtgtacacagactgacgaaactttaaataaatgggaattaaatatttaagagctgactggaaaa

SEQ ID NO: 793 - DNA, 1818 bp, Homo sapiens
ggcgcccgcgcccgcccccgcgccgggcccggctcggcccgacccggctccgccgcgggcaggcggggcccagcgcactcggagcccgagcccgagccgcagccgccgcctggggcgcttgggtcggcctcgaggacaccggagaggggcgccacgccgccgtggccgcagaaatgaccatggttgacacagagatgccattctggcccaccaactttgggatcagctccgtggatctctccgtaatggaagaccactcccactcctttgatatcaagcccttcactactgttgacttctccagcatttctactccacattacgaagacattccattcacaagaacagatccagtggttgcagattacaagtatgacctgaaacttcaagagtaccaaagtgcaatcaaagtggagcctgcatctccaccttattattctgagaagactcagctctacaataagcctcatgaagagccttccaactccctcatggcaattgaatgtcgtgtctgtggagataaagcttctggatttcactatggagttcatgcttgtgaaggatgcaagggtttcttccggagaacaatcagattgaagcttatctatgacagatgtgatcttaactgtcggatccacaaaaaaagtagaaataaatgtcagtactgtcggtttcagaaatgccttgcagtggggatgtctcataatgccatcaggtttgggcggatgccacaggccgagaaggagaagctgttggcggagatctccagtgatatcgaccagctgaatccagagtccgctgacctccgggccctggcaaaacatttgtatgactcatacataaagtccttcccgctgaccaaagcaaaggcgagggcgatcttgacaggaaagacaacagacaaatcaccattcgttatctatgacatgaattccttaatgatgggagaagataaaatcaagttcaaacacatcacccccctgcaggagcagagcaaagaggtggccatccgcatctttcagggctgccagtttcgctccgtggaggctgtgcaggagatcacagagtatgccaaaagcattcctggttttgtaaatcttgacttgaacgaccaagtaactctcctcaaatatggagtccacgagatcatttacacaatgctggcctccttgatgaataaagatggggttctcatatccgagggccaaggcttcatgacaagggagtttctaaagagcctgcgaaagccttttggtgactttatggagcccaagtttgagtttgctgtgaagttcaatgcactggaattagatgacagcgacttggcaatatttattgctgtcattattctcagtggagaccgcccaggtttgctgaatgtgaagcccattgaagacattcaagacaacctgctacaagccctggagctccagctgaagctgaaccaccctgagtcctcacagctgtttgccaagctgctccagaaaatgacagacctcagacagattgtcacggaacacgtgcagctactgcaggtgatcaagaagacggagacagacatgagtcttcacccgctcctgcaggagatctacaaggacttgtactagcagagagtcctgagccactgccaacatttcccttcttccagttgcactattctgagggaaaatctgacacctaagaaatttactgtgaaaaagcattttaaaaagaaaaggttttagaatatgatctattttatgcatattgtttataaagacacatttacaatttacttttaatattaaaaattaccatattatgaaattgctgatagta

SEQ ID NO: 794 - DNA, 6318 bp, Homo sapiens
tagtaagacaggtgccttcagttcactctcagtaaggggctggttgcctgcatgagtgtgtgctctgtgtcactgtggattggagttgaaaaagcttgactggcgtcattcaggagctggatggcgtgggacatgtgcaaccaggactctgagtctgtatggagtgacatcgagtgtgctgctctggttggtgaagaccagcctctttgcccagatcttcctgaacttgatctttctgaactagatgtgaacgacttggatacagacagctttctgggtggactcaagtggtgcagtgaccaatcagaaataatatccaatcagtacaacaatgagccttcaaacatatttgagaagatagatgaagagaatgaggcaaacttgctagcagtcctcacagagacactagacagtctccctgtggatgaagacggattgccctcatttgatgcgctgacagatggagacgtgaccactgacaatgaggctagtccttcctccatgcctgacggcacccctccaccccaggaggcagaagagccgtctctacttaagaagctcttactggcaccagccaacactcagctaagttataatgaatgcagtggtctcagtacccagaaccatgcaaatcacaatcacaggatcagaacaaaccctgcaattgttaagactgagaattcatggagcaataaagcgaagagtatttgtcaacagcaaaagccacaaagacgtccctgctcggagcttctcaaatatctgaccacaaacgatgaccctcctcacaccaaacccacagagaacagaaacagcagcagagacaaatgcacctccaaaaagaagtcccacacacagtcgcagtcacaacacttacaagccaaaccaacaactttatctcttcctctgaccccagagtcaccaaatgaccccaagggttccccatttgagaacaagactattgaacgcaccttaagtgtggaactctctggaactgcaggcctaactccacccaccactcctcctcataaagccaaccaagataacccttttagggcttctccaaagctgaagtcctcttgcaagactgtggtgccaccaccatcaaagaagcccaggtacagtgagtcttctggtacacaaggcaataactccaccaagaaagggccggagcaatccgagttgtatgcacaactcagcaagtcctcagtcctcactggtggacacgaggaaaggaagaccaagcggcccagtctgcggctgtttggtgaccatgactattgccagtcaattaattccaaaacagaaatactcattaatatatcacaggagctccaagactctagacaactagaaaataaagatgtctcctctgattggcaggggcagatttgttcttccacagattcagaccagtgctacctgagagagactttggaggcaagcaagcaggtctctccttgcagcacaagaaaacagctccaagaccaggaaatccgagccgagctgaacaagcacttcggtcatcccagtcaagctgtttttgacgacgaagcagacaagaccggtgaactgagggacagtgatttcagtaatgaacaattctccaaactacctatgtttataaattcaggactagccatggatggcctgtttgatgacagcgaagatgaaagtgataaactgagctacccttgggatggcacgcaatcctattcattgttcaatgtgtctccttcttgttcttcttttaactctccatgtagagattctgtgtcaccacccaaatccttattttctcaaagaccccaaaggatgcgctctcgttcaaggtccttttctcgacacaggtcgtgttcccgatcaccatattccaggtcaagatcaaggtctccaggcagtagatcctcttcaagatcctgctattactatgagtcaagccactacagacaccgcacgcaccgaaattctcccttgtatgtgagatcacgttcaagatcgccctacagccgtcggcccaggtatgacagctacgaggaatatcagcacgagaggctgaagagggaagaatatcgcagagagtatgagaagcgagagtctgagagggccaagcaaagggagaggcagaggcagaaggcaattgaagagcgccgtgtgatttatgtcggtaaaatcagacctgacacaacacggacagaactgagggaccgttttgaagtttttggtgaaattgaggagtgcacagtaaatctgcgggatgatggagacagctatggtttcattacctaccgttatacctgtgatgcttttgctgctcttgaaaatggatacactttgcgcaggtcaaacgaaactgactttgagctgtacttttgtggacgcaagcaatttttcaagtctaactatgcagacctagattcaaactcagatgactttgaccctgcttccaccaagagcaagtatgactctctggattttgatagtttactgaaagaagctcagagaagcttgcgcaggtaacatgttccctagctgaggatgacagagggatggcgaatacctcatgggacagcgcgtccttccctaaagactattgcaagtcatacttaggaatttctcctactttacactctctgtacaaaaacaaaacaaaacaacaacaatacaacaagaacaacaacaacaataacaacaatggtttacatgaacacagctgctgaagaggcaagagacagaatgatatccagtaagcacatgtttattcatgggtgtcagctttgcttttcctggagtctcttggtgatggagtgtgcgtgtgtgcatgtatgtgtgtgtgtatgtatgtgtgtggtgtgtgtgcttggtttaggggaagtatgtgtgggtacatgtgaggactgggggcacctgaccagaatgcgcaagggcaaaccatttcaaatggcagcagttccatgaagacacgcttaaaacctagaacttcaaaatgttcgtattctattcaaaaggaaatatatatatatatatatatatatatatatatatatataaattaaaaaggaaagaaaactaacaaccaaccaaccaaccaaccaaccacaaaccaccctaaaatgacagccgctgatgtctgggcatcagcctttgtactctgtttttttaagaaagtgcagaatcaacttgaagcaagctttctctcataacgtaatgattatatgacaatcctgaagaaaccacaggttccatagaactaatatcctgtctctctctctctctctctctctctcttttttttttctttttccttttgccatggaatctgggtgggagaggatactgcgggcaccagaatgctaaagtttcctaacattttgaagtttctgtagttcatccttaatcctgacacccatgtaaatgtccaaaatgttgatcttccactgcaaatttcaaaagccttgtcaatggtcaagcgtgcagcttgttcagcggttctttctgaggagcggacaccgggttacattactaatgagagttgggtagaactctctgagatgtgttcagatagtgtaattgctacattctctgatgtagttaagtatttacagatgttaaatggagtatttttattttatgtatatactatacaacaatgttcttttttgttacagctatgcactgtaaatgcagccttcttttcaaaactgctaaatttttcttaatcaagaatattcaaatgtaattatgaggtgaaacaattattgtacactaacatatttagaagctgaacttactgcttatatatatttgattgtaaaaacaaaaagacagtgtgtgtgtctgttgagtgcaacaagagcaaaatgatgctttccgcacatccatcccttaggtgagcttcaatctaagcatcttgtcaagaaatatcctagtcccctaaaggtattaaccacttctgcgatatttttccacattttcttgtcgcttgtttttctttgaagttttatacactggatttgttaggggaatgaaattttctcatctaaaatttttctagaagatatcatgattttatgtaaagtctctcaatgggtaaccattaagaaatgtttttattttctctatcaacagtagttttgaaactagaagtcaaaaatctttttaaaatgctgttttgttttaatttttgtgattttaatttgatacaaaatgctgaggtaataattatagtatgatttttacaataattaatgtgtgtctgaagactatctttgaagccagtatttctttcccttggcagagtatgacgatggtatttatctgtattttttacagttatgcatcctgtataaatactgatatttcattcctttgtttactaaagagacatatttatcagttgcagatagcctatttattataaattatgagatgatgaaaataataaagccagtggaaattttctacctaggatgcatgacaattgtcaggttggagtgtaagtgcttcatttgggaaattcagcttttgcagaagcagtgtttctacttgcactagcatggcctctgacgtgaccatggtgttgttcttgatgacattgcttctgctaaatttaataaaaacttcagaaaaacctccattttgatcatcaggatttcatctgagtgtggagtccctggaatggaattcagtaacatttggagtgtgtattcaagtttctaaattgagattcgattactgtttggctgacatgacttttctggaagacatgatacacctactactcaattgttcttttcctttctctcgcccaacacgatcttgtaagatggatttcacccccaggccaatgcagctaattttgatagctgcattcatttatcaccagcatattgtgttctgagtgaatccactgtttgtcctgtcggatgcttgcttgattttttggcttcttatttctaagtagatagaaagcaataaaaatactatgaaatgaaagaacttgttcacaggttctgcgttacaacagtaacacatctttaatccgcctaattcttgttgttctgtaggttaaatgcaggtattttaactgtgtgaacgccaaactaaagtttacagtctttctttctgaattttgagtatcttctgttgtagaataataataaaaagactattaagagcaataaattatttttaagaaatcgagatttagtaaatcctattatgtgttcaaggaccacatgtgttctctattttgcctttaaatttttgtgaaccaattttaaatacattctcctttttgccctggattgttgacatgagtggaatacttggtttcttttcttacttatcaaaagacagcactacagatatcatattgaggattaatttatcccccctacccccagcctgacaaatattgttaccatgaagatagttttcctcaatggacttcaaattgcatctagaattagtggagcttttgtatcttctgcagacactgtgggtagcccatcaaaatgtaagctgtgctcctctcatttttatttttatttttttgggagagaatatttcaaatgaacacgtgcaccccatcatcactggaggcaaatttcagcatagatctgtaggatttttagaagaccgtgggccattgccttcatgccgtggtaagtaccacatctacaattttggtaaccgaactggtgctttagtaatgtggatttttttcttttttaaaagagatgtagcagaataattcttccagtgcaacaaaatcaattttttgctaaacgactccgagaacaacagttgggctgtcaacattcaaagcagcagagagggaactttgcactattggggtatgatgtttgggtcagttgataaaaggaaaccttttcatgcctttagatgtgagcttccagtaggtaatgattatgtgtcctttcttgatggctgtaatgagaacttcaatcactgtagtctaagacctgatctatagatgacctagaatagccatgtactataatgtgatgattctaaatttgtacctatgtgacagacattttcaataatgtgaactgctgatttgatggagctactttaagatttgtaggtgaaagtgtaatactgttggttgaactatgctgaagagggaaagtgagcgattagttgagcccttgccgggccttttttccacctgccaattctacatgtattgttgtggttttattcattgtatgaaaattcctgtgattttttttaaatgtgcagtacacatcagcctcactgagctaataaagggaaacgaatgtttcaaatcta

SEQ ID NO: 795 - DNA, 5165 bp, Homo sapiens
gggaagccagacggttaacacagacaaagtgctgccgtgacactcggccctccagtgttgcggagaggcaagagcagcgaccgcggcacctgtccgcccggagctgggacgcgggcgcccgggcggccggacgaagcgaggagggaccgccgaggtgcgcgtctgtgcggctcagcctggcgggggacgcggggagaatgtggactgggtagagatgaacgagacttttctcagatgttggatatttgcttggaaaaacgtgtgggtacgaccttggctgcccccaagtgtaactccagcactgtgaggtttcagggattggcagaggggaccaaggggaccatgaaaatggacatggaggatgcggatatgactctgtggacagaggctgagtttgaagagaagtgtacatacattgtgaacgaccacccctgggattctggtgctgatggcggtacttcggttcaggcggaggcatccttaccaaggaatctgcttttcaagtatgccaccaacagtgaagaggttattggagtgatgagtaaagaatacataccaaagggcacacgttttggacccctaataggtgaaatctacaccaatgacacagttcctaagaacgccaacaggaaatatttttggaggatctattccagaggggagcttcaccacttcattgacggctttaatgaagagaaaagcaactggatgcgctatgtgaatccagcacactctccccgggagcaaaacctggctgcgtgtcagaacgggatgaacatctacttctacaccattaagcccatccctgccaaccaggaacttcttgtgtggtattgtcgggactttgcagaaaggcttcactacccttatcccggagagctgacaatgatgaatctcacacaaacacagagcagtctaaagcaaccgagcactgagaaaaatgaactctgcccaaagaatgtcccaaagagagagtacagcgtgaaagaaatcctaaaattggactccaacccctccaaaggaaaggacctctaccgttctaacatttcacccctcacatcagaaaaggacctcgatgactttagaagacgtgggagccccgaaatgcccttctaccctcgggtcgtttaccccatccgggcccctctgccagaagactttttgaaagcttccctggcctacgggatcgagagacccacgtacatcactcgctcccccattccatcctccaccactccaagcccctctgcaagaagcagccccgaccaaagcctcaagagctccagccctcacagcagccctgggaatacggtgtcccctgtgggccccggctctcaagagcaccgggactcctacgcttacttgaacgcgtcctacggcacggaaggtttgggctcctaccctggctacgcacccctgccccacctcccgccagctttcatcccctcgtacaacgctcactaccccaagttcctcttgcccccctacggcatgaattgtaatggcctgagcgctgtgagcagcatgaatggcatcaacaactttggcctcttcccgaggctgtgccctgtctacagcaatctcctcggtgggggcagcctgccccaccccatgctcaaccccacttctctcccgagctcgctgccctcagatggagcccggaggttgctccagccggagcatcccagggaggtgcttgtcccggcgccccacagtgccttctcctttaccggggccgccgccagcatgaaggacaaggcctgtagccccacaagcgggtctcccacggcgggaacagccgccacggcagaacatgtggtgcagcccaaagctacctcagcagcgatggcagcccccagcagcgacgaagccatgaatctcattaaaaacaaaagaaacatgaccggctacaagacccttccctacccgctgaagaagcagaacggcaagatcaagtacgaatgcaacgtttgcgccaagactttcggccagctctccaatctgaaggtccacctgagagtgcacagtggagaacggcctttcaaatgtcagacttgcaacaagggctttactcagctcgcccacctgcagaaacactacctggtacacacgggagaaaagccacatgaatgccaggtctgccacaagagatttagcagcaccagcaatctcaagacccacctgcgactccattctggagagaaaccataccaatgcaaggtgtgccctgccaagttcacccagtttgtgcacctgaaactgcacaagcgtctgcacacccgggagcggccccacaagtgctcccagtgccacaagaactacatccatctctgtagcctcaaggttcacctgaaagggaactgcgctgcggccccggcgcctgggctgcccttggaagatctgacccgaatcaatgaagaaatcgagaagtttgacatcagtgacaatgctgaccggctcgaggacgtggaggatgacatcagtgtgatctctgtagtggagaaggaaattctggccgtggtcagaaaagagaaagaagaaactggcctgaaagtgtctttgcaaagaaacatggggaatggactcctctcctcagggtgcagcctttatgagtcatcagatctacccctcatgaagttgcctcccagcaacccactacctctggtacctgtaaaggtcaaacaagaaacagttgaaccaatggatccttaagattttcagaaaacacttattttgtttcttaagttatgacttggtgagtcagggtgcctgtaggaagtggcttgtacataatcccagctctgcaaagctctctcgacagcaaatggtttcccctcacctctggaattaaagaaggaactccaaagttactgaaatctcagggcatgaacaaggcaaaggccatatatatatatatatatatatctgtatacatattatatatacttatttacacctgtgtctatatatttgcccctgtgtattttgaatatttgtgtggacatgtttgcatagccttcccattactaagactattacctagtcataattattttttcaatgataatccttcataatttattatacaatttatcattcagaaagcaataattaaaaaagtttacaatgactggaaagattccttgtaatttgagtataaatgtatttttgtcttgtggccattctttgtagataatttctgcacatctgtataagtacctaagatttagttaaacaaatatatgacttcagtcaacctctctctctaataatggtttgaaaatgaggtttgggtaattgccaatgttggacagttgatgtgttcattcctgggatcctatcatttgaacagcattgtacataacttgggggtatgtgtgcaggattacccaagaataacttaagtagaagaaacaagaaagggaatcttgtatatttttgttgatagttcatgtttttcccccagccacaattttaccggaagggtgacaggaaggctttaccaacctgtctctccctccaaaagagcagaatcctcccaccgccctgccctccccaccgagtcctgtggccattcagagcggccacatgacttttgcatccattgtattatcagaaaatgtgaagaagaaaaaaatgccatgttttaaaaccactgcgaaaatttccccaaagcataggtggctttgtgtgtgtgcgatttgggggcttgagtctgggtggtgttttgttgttggtttttgttgctttttttttttttttttttttaatgtcaaaattgcacaaacatggtgctctaccaggaaggattcgaggtagataggctcaggccacactttaaaaacaaacacacaaacaacaaaaaacgggtattctagtcatcttggggtaaaagcgggtaatgaacattcctatccccaacacatcaattgtattttttctgtaaaactcagattttcctcagtatttgtgtttttacattttatggttaatttaatggaagatgaaagggcattgcaaagttgttcaacaacagttacctcattgagtgtgtccagtagtgcaggaaatgatgtcttatctaatgatttgcttctctagaggagaaaccgagtaaatgtgctccagcaagatagactttgtgttattctatcttttattctgctaagcccaaagattacatgttggtgttcaaagtgtagcaaaaaatgatgtatatttataaatctatttataccactatatcatatgtatatatatttataaccacttaaattgtgagccaagccatgtaaaagatctactttttctaagggcaaaaaaaaaaaaaaaaaaaaaagaacactcctttctgagactttgcttaatacttggtgacctcacaatcacgtcggtatgattgggcacccttgcctactgtaagagaccctaaaaccttggtgcagtggtggggaccacaaaacaaccagggaggaagagatacatcattttttagtattaaggaccatctaagacagctctattttttttttgccactttatgattatgtggtcacacccaagtcacagaaataaaaaactgactttaccgctgcaatttttctgttttcctccttactaaatactgatacattactccaatctattttataattatatttgacattttgttcacatcaactaatgttcacctgtagaagagaacaaatttcgaataatccagggaaacccaagagccttactggtcttctgtaacttccaagactgacagctttttatgtatcagtgtttgataaacacagtccttaactgaaggtaaaccaaagcatcacgttgacattagaccaaatacttttgattcccaactactcgtttgttctttttctccttttgtgctttcccatagtgagaatttttataaagacttcttgcttctctcaccatccatccttctcttttctgcctcttacatgtgaatgttgagcccacaatcaacagtggttttattttttcctctactcaaagttaaaactgaccaaagttactggctttttactttgctagaacaacaaactatcttatgtttacatactggtttacaatgttatttatgtgcaaattgtcaaaatgtaaattaaatataaatgttcatgctttaccaaaat

SEQ ID NO: 796 - DNA, 6341 bp, Homo sapiens
actctgcggcgggaagaaccacctggaggtggcggggggggttgatttctatcacccctagggagagaggatcggggacccgctgatcttccagctcccctcacccaacgtcgtgcatgctgcagacagacctttccgtccttcatgaacacacgtgtggtagacagatgactgtcctgtaccctgtgctgctctaggtgtgccagacgtggagctgtccagttgggagaagatggattccaaagatgaaagctcgcatgtgtggccgacatctgcagagcatgaacagaatgccgcacaggtgcactttgttccggacacaggaacagtggctcagattgtctataccgatgaccaggttcgccccccacagcaggtggtgtacacggcagatggtgcctcctacacatcagtggatggtccagagcacacgctggtgtacatccacccggtggaagctgcacagactctgtttacagaccccggccaggtagcttatgtccaacaggatgctacagctcagcaggcctcattgccagttcataaccaggtgctgccttccatcgagagtgtagatgggtccgaccctttggcaactctgcagacccctctaggcagactggaggccaaagaggaagaggatgaggatgaggacgaggacactgaggaagatgaggaagaagacggtgaggacacggatctggatgactgggagccagacccgccccggcccttcgacccacacgacttgtggtgtgaggagtgcaataacgcgcatgcttcagtgtgtccgaagcacggccccttgcacccgatccccaaccggccggtgctcacccgggccagggcgagcctccccctggtgctctacatagacaggtttctgggcggggtgttctccaagcggcgcatccccaagcgcacccagtttggccccgtggaggggcctctcgtcaggggctcggagctgaaagactgttacattcacctcaaggtttctcttgataaaggggacaggaaagaaagggatttacatgaagacctatggtttgagttgtctgatgagacgctttgtaactggatgatgtttgtacggccagcccagaatcacctggagcagaacctggtggcttaccagtatggccaccatgtgtattatacaaccataaaaaatgtggagcccaagcaggaactgaaggtgtggtatgccgcatcctatgctgagttcgtgaaccagaaaattcatgacatttctgaggaagaaaggaaagttcttcgagagcaagagaagaattggccctgctatgaatgtaaccgccgatttataagctcggagcagttgcaacagcatctcaattctcatgatgagaaactagatgtgtttagcagaacaagaggcagaggaaggggacgaggcaagaggcgattcggtccaggtcgacggccggggcgtcctccaaaatttatccgcctggaaatcaccagcgaaaatggggaaaagagtgacgatgggacacaggacttgctacattttcccacaaaggagcaatttgatgaggctgaaccagccactctgaatgggctggatcaaccagaacagaccactatcccaatccctcagctgccacaggaaacccagtcttccctggaacatgaaccagaaactcacaccctgcacctgcagccgcagcatgaagagagcgtggtgcccacccagagcacgctgacagccgacgacatgcgcagagccaagcgcatccgattggagctgcagaatgcagctcttcagcatctgtttattcggaagtccttccggccttttaaatgcttgcagtgtgggaaggccttccgggaaaaggacaaactggaccagcacttacgcttccatgggcgggaggggaactgcccactgacctgtgatctctgtaacaagggcttcatcagcagcacatccttggagagccacatgaagctccactcagaccagaagacttactcttgcattttttgcccagaatcctttgaccgccttgatttgttgaaagatcatgtggccattcatatcaatgatggctacttcacctgcccaacttgtaagaaacggttcccagattttatccaggtgaaaaaacacgtgcgcagcttccactcagaaaagatctaccagtgcacagagtgtgacaaggccttctgtcgccccgataaactgcgactccacatgctccggcattcggaccgcaaagacttcctgtgttccacctgtgggaagcaatttaagcgaaaagacaaactacgggaacacatgcagaggatgcataatcctgagagggaggccaagaaagccgaccgcatcagccgctccaagacgttcaagccccgcatcacgtccacagactacgacagcttcacgttcaagtgccgcctgtgcatgatgggcttccggcggcgcggcatgctggtaaatcacttatcgaagagacacccagacatgaagatagaagaggtgccagagttaactctacccatcataaaacccaatcgtgattacttttgtcagtattgcgataaggtttataaaagtgccagcaagcgcaaagcccacattctgaagaaccacccaggagcagagctcccaccgagcattcggaagctccgacccgctggtcctggagagccagaccccatgctgagcacacacacccagctgacgggcaccatcgccacccctcccgtctgctgtccccactgctccaagcagtacagcagcaagaccaagatggtccagcacattcgaaagaagcatccagagttcgcccagctctccaacaccatacacacaccactgacgacagctgtgatcagtgccaccccagcggttttgactacagacagcgccactggagagactgtggtgacgacggacctgctcacccaagcaatgacagaactgtcccagaccttaacgacagactaccgaacgccacaaggggattaccagagaattcagtacatccctgtgtcgcagtcggcgtctggcctccagcagcctcagcacatacagctgcaagtggttcaagtggcctcggccacttcccctcaccagtcacagcagtccactgtggatgttggccagctccatgatcctcagccctacccccagcacgccatccaggtgcagcacatccaggtcagcgagcctaccgcctcggccccgtcctccgcccaggtatctgggcagccgttgagtccctcagcccagcaggctcagcaggggctcagcccctcccacatccagggcagttcttccacacaggggcaggctctgcagcagcagcagcagcagcagcagaattcctctgtgcagcacacgtacctgcccagtgcttggaattccttccgtggctattcatctgagattcaaatgatgacgcttcctccgggtcagtttgtgattacagacagtggtgtggcaactccagttactactggccaggtgaaggcggttacttcgggtcattatgtgttatcagaaagtcaatcagaattggaagaaaagcaaacttctgccctctctggtggagtccaggtcgagccacctgcacacagtgactccctggacccccagaccaacagccaacagcagaccacacagtacatcatcaccaccaccaccaacgggaacggaagcagcgaagtgcatatcaccaaaccatgacttccaccctggagcttgaatccagcacccacctcatgtctgttctcataagtctgaaagctctgacacgtagagctcttttgtaagatttattattcactcaagagttcggaaaccacagttttgtctctcatccatacactggggtttattttgccaaggtcatctttatcaaattgactcttcaaaccctcggtttttgccacagaacagagatctttcaggggaaagtagatttcgaggtggagagaatttgccttgctcttgagctggtcttttaacatactgacgagccttacttttcctttgtggaaatattaagtggcatattgtgttcataccaaaggtggagacaggatgtgccaagttcatggttactggacttcttattccaagccatggcaccaaaggagaaggggcattttgtgggtgtgcattaggtctgaactgctttatcttgttttagttttcagtaatttaacaaagggagcctgctgaataacaaaattaaaatgatgaaacaaaagtttgacagtgatattctgaagcaaaaactgtcatctaaatttttcttgctgattttttttaacttccctattttagaaaactattgttgggctgttggtagtgctttccacagatgctggtcctcagtggattaggtcagaagctcatgttctgatagttcttcattatttcacaaaggtggacaacctgaaagagaaaaggctgcttgatgtcagcagaatctaaacccctacattaaagctttgcctcccattctgtggttgtggtggtggtaagaaggagatattggtaccaagaaaaatttccaaaactattgagagagagagagagaaagtattgaaattttgttctgccttgcaggatccatttatcattcattggtaaaggatatattccttgttcttaccaagtgtacatttaactcttgctgacatgttcagtgtattttattacttttaatgctgtcttaaaatgaacattctttaaagttggacaggaaggtggcatttcttatttattaacatttttaactttaaacatattgtgactcatctagaccttttaataagacgatcaacttcacacttagggaaaaaattaaaatgtgatggccacttctaataattcaggtagttataagggatctggaagaaatccagtctttatgaatatactattagttgggcattaaaaaatcagtatatattttaactttttgtgacatgctaacacattttcagaataattattgcatagtagaatttattactccagaacagaaagaccttacttcatttcaaatgaagttaattaatttacatttctgggtaaaaactggttctataaattaagtagagtagcttctttatgataaagacaattttctgaaaagtgaacaattctgttaaaagaactttattgatgtgtagatttcgcactttatttctgagactgcgttcatgtagttgttccccaatgtttgagtactaagagaacttgagaaaattacttcataaacatatggaaactgaaaatggactctctttgtgacaaagatattcaacagaaaatattgaccctgcattgcaaaacacaggttcgggttccctaagtcccacagtgtaatgattacaaatatcctagtgtccggtctagaaagactttctaggagaagactagtggaattttctaaaggttcagttttagcttttataacttaaatttggccctgttacgttctttttaatttgaaccataaggtatctcccctcccttcaggaataacttattggaaaactgaaaagaatcactgaatggaatgttcattttatggcagttgttttaagttttaaaatacacagaggaaaatattgtggaaggacctctttgttgctttcccttctaagttgtcttcttcttcttcttcttcttcttcttctttggtccttaagtgaaataaagactctaaaactaatttgtatattatcagccagagatgcggatggcagtcgagccaaatcgcatggctttcagatcaggtattctgcacattcattccaaggtcatagatttttaaaaggacctggatttgaagagatggcaaatgatgagccatcagaaaacttaatttggaaaacatgtatgtagccagtgtggatattgtggcctctctcaagacacattgacactgtagacttcattcagtccagtgtgagtattttggagtaggttggatgtagattttgtttttatcattgatttgtaccgacagaaatagacatttcatcatgtaaaattcctgttattctggaaaaacctattgttttgatcttcttgttttctgacttggaagtatcctttcaaaaaaactcttaagatatctaggtctaaaaagcacttcatgagatgctaaagctgacccactggttgaaaatgttgaccctatcctgttatttaaatgtgaacatttattgtacattcagtgagttatagtgttaatagtcttgtgctatgcagcaggtgtaaaaattaataaatatattttttaataaacatgtttgtatgtgtgaagctacaagaaaaaaaaaaaaaaaaaaaa

SEQ ID NO: 797 - DNA, 2229 bp, Homo sapiens
gtcttgaggaccatctctcccggcagcataccgtgtggcttcacactgctctgcctctctgaacctcggtttcttcatctataaaatgggaataagagtaagccacctcaatggactgtgggaggcttaagtaaattgaagtgccatgcaagtagctagcatgcagttgcagctcaatgaatattatgatggccgcagatacgatggctacagctggggcacccatttcgggtcacaaggtagggttcaatgttgaagatggcagagccaattgcatccctgatgatcgtggagtgccgggcctgcctgagatgctcacctctcttcctttaccagagagagaaagacagaatgaccgagaacatgaaggagtgcttggcccagaccaatgcagccgtgggggatatggtgacggtggtgaagacggaggtctgctcaccactccgagaccaggagtatggccagccctgctctaggagaccggactcctcggccatggaagttgagcccaagaaactgaaggggaagcgcgacctcatcgtgcccaaaagcttccagcaagtggacttctggttctgtgagtcctgccaggagtacttcgtggatgaatgcccaaaccatggccccccggtgtttgtgtctgacacaccggtgcccgtgggcatcccagaccgggcggcgctcaccatcccacagggcatggaggtggtcaaggacactagtggagagagtgacgtgcgatgtgtaaacgaggtcatccccaagggccacatcttcggcccctatgaggggcagatctccacccaggacaaatcagctggcttcttctcctggctgattgtggacaagaacaaccgctataagtccatagatggctcagacgagaccaaagccaactggatgaggtacgtggtcatctcccgggaggagagggagcagaacctgctggcgttccagcacagtgagcgcatctacttccgggcgtgcagggacatccggcctggggagtggctgcgggtctggtacagcgaggactacatgaagcgcctgcacagcatgtcccaggaaaccattcaccgcaacctggccagaggagagaagaggttgcagagggagaagtctgagcaggttctggataacccagaagacctgaggggtcccattcatctctctgtgctgagacagggcaaaagtccctacaagcgtggctttgatgagggggatgtacacccccaagctaagaagaagaaaattgacctgattttcaaggatgttctggaggcctcactggaatctgcgaaggtggaagcccaccagttggccctgagcacctcactggtcatcaggaaagtccccaaataccaggatgacgcctacagtcagtgtgcaacaacaatgacccatggtgtgcagaatataggccagacccagggggagggggactggaaggtcccccagggggtctccaaggagccaggccaattggaggatgaagaagaggagccttcatcattcaaggccgacagtcctgccgaggcctcccttgcatctgaccctcatgaacttcccaccacctctttttgccctaactgtattcgcctaaagaagaaggttcgggagctccaggcagaattagacatgcttaagtctgggaaacttcctgagccccccgtattgccaccacaggtactggagctcccagagttctcggaccctgcaggtaagttggtttggatgagattattgtcggagggcagagtacgcagtgggctgtgtggagggtagcctaaagctctctgtggaaaccaccttccgggagacctgaggagtgtaacgtggaggcggctacctccgtgggtgggagcccaggtcctcagtgtctctggcagacccatcggcagctctgccaggtgctccatgtgttgcccttgtatcctccttgtcaataaaggaagttccgctgcagaaggggtgtgtgctgtgttcttgacccgttgcctttctctggtactggtgtcttaccccaaagcccaatttctaaacccagtctttctctgtccccagtctcaagcagggtgtcccactggagagatctcttggcttccctaacttagtccaggaacacagccttgttcttctcttcctgaatctctgtcctgccacacatggtcccagttccctagcctggagttctagaaggatggagagtgaggggatccaggccattca

SEQ ID NO: 798 - DNA, 2492 bp, Homo sapiens
cccgcccacctcccccgtcggcccggccgtcccccggcgccggggagctccgggccgcccatgatgggctccgtgctcccggctgaggccctggtgctcaagaccgggctgaaggcgccgggactggcgctggccgaggttatcacctccgacatcctgcacagcttcctgtacggccgctggcgcaacgtgctcggggagcagctcttcgaggacaagagccaccacgccagccccaagacagccttcaccgccgaggtgctggcgcagtccttctccggcgaagtgcagaagctgtccagcctggtgctgcctgcggaggtgatcatcgctcagagctccatccctggcgagggcctcggcatcttctccaagacgtggatcaaggcgggaaccgagatgggccccttcaccggccgcgtgatcgccccggagcacgtggacatctgcaagaacaacaacctcatgtgggaggtgttcaatgaggatggcacggtgcgctacttcatcgatgccagccaggaggaccaccggagctggatgacctacatcaagtgtgcacgtaacgaacaggagcagaacctggaggtggtccagatcggcaccagcatcttctacaaggccattgagatgatcccacctgaccaggaactgctggtgtggtacggaaactcacacaacaccttcctggggatcccaggtgtgcccgggctagaggaggaccagaaaaagaacaagcatgaggacttccacccggcggactcggcggctggccccgcgggccgcatgcgatgcgtcatctgccaccgcggcttcaactcgcgcagcaacctgcgctcgcacatgcgcatccacacgctggacaagcccttcgtgtgccgcttctgcaaccgccgcttcagccagtcgtccacgctgcgcaaccacgtgcgcctgcacacgggcgagcgcccctacaagtgccaggtgtgccagagcgcctactcgcagctggccggcctgcgcgcccaccagaagagcgcgcggcaccggccgcccagcaccgcgctgcaggcacactcgcccgcgctgcccgccccgcacgcgcacgcgcccgcgctcgccgccgccgccgccgccgccgccgccgccgccgcgcaccacctgccggccatggtgctgtgagcgcgcccgcgcccccgccgggccccgcgcgctcctgggtccccggcaccccggccccgcagcgcgactcgccctccagccccaacccccggcccggcgccgccgcggagccccgcgcgctggggttgcgccccggaggcggatctcaggcacccccgccttggcccgtgtcgcagatgaggacactgagggcggcgtccctcacccaggccacgcagctggtgcggctgttcggccgcctcctctgggagggggtccccctgcctggcctcgcccccgagtctccctgctgctgtagagccgggcgcccaggccggcatccccctcgtgggtggcaggagagcggacttagagcccccgagggcccctcagcagaggaaggggagtcccctcctccgccaccgagagtcctgtgcttcggaatgaagggagggcgacctccttgtccgggtgtggtcgggcgcgggggttgtgggggcgccatctcctcttccggcccctgggactggtgtcctgaagtgtcgggagtccttacgcaaccttgacatgtgcgggctactggggtccatcggcagcgggaagagacccggagagatgcatcttctgggcccttctctcctttaggccagcttacccccaaacctggctcctggggacggatgaggaaggagctctttgcagtgcaccaggcacgttgagagtggaggcacaatggaaatcctctgtgggaccccgagcaagaccctgcacctctttgggcctcagtttccccatctgtaaaatgaaggagttggaccaatgccccctccccttcagctgtgacatcgtgcctgggaaggcgaaatatacccccagccccttccaacacacacactccagcgagaggagggcaagactggaaccgctgcccgagaggttaaggtggcttctgtggccacgaagcgcttccgagctgtgcccagtcccgggaattccgcccagtctgcccacacttccctcggtccctgcccgtttcctcaaattcgggccgtgcgcgccctctggtgtcgcctctcacactttgcagtcatttaccaggattcccgtagggcgttttgtaaaataaactataatattaatgaaaagtataaaatgtatagagttttcaagaaactgcgttctacttccagaagatggtcactttaaccttgtaaatatttatctaaaatgatatttacaaaactgtaatatattattatttgattgtatatgtacaactgtaaatacatttgtacctctcttgtattctaaaataaaaattacttggaacatttatcatttagcatctg

SEQ ID NO: 799 - DNA, 3204 bp, Homo sapiens
ccatgtgaccctctcgggtgggactctgcagctgcttcgcagcgcaactctctcaccaaactccgcgcccttgcgctagcggtgccaaaaggctcccgccccgattgaaaaggcgcagtgcatgcccgcccgcgtcactccgcgggcggaggacgcacgtcggggcgcggctctctggctagcgcgcagctccagctctgtcactcgcgcccttccaaggacctggagcacccgagcgcctgcctggtggcggcggcaacaatgcacggagccgccagagcgccagccaccagcgtgagtgccgactgctgcatcccggccggcttgcgcctcggaccggtgcctggtaccttcaagctgggcaagtacctgtcagaccgcagggagcccgggcctaagaaaaaggtgcgcatggtgagaggggagctggtggacgagtcggggggctcccctctggagtggatagggttaatccgggcagccagaaactcccaggaacagactctggaagctattgcagacttacccggaggacagatcttctaccgagcattgcgagacgtccagccaggggaggagctgacagtgtggtattctaactccttggctcagtggttcgacatccccaccacagcgactccgactcacgacgagaaaggggaggagcgctacatctgctggtactgctggaggacgtttagataccccaacagccttaaggcacacctgcgtttccactgcgtgttcagcggcggtggaggcggcgccttcctgcaccacgaacacgcggctcgccaaggcgccgtcccagcggctgatggcctcggtctctccccaaaacccccggcgcccgatttcgccgcgccttcccaggcaggaactttgcgaccccaccccctgggcccgccaccagttcaggcctgcggtgcgcgggagggcatcaagcgcgaggcctcttccgcgccctcggccacctcgccgaccccaggcaagtgggggcagcccaagaagggcaaggagcagctggaccgtgccctggacatgagcggagccgcccgaggacaagggcacttcctcggcatcgtgggcggctcctcggcgggggtcggcagcctggctttctaccccggcgtgcgctcagctttcaagcccgccggcctagcgagggcggcggcggccgctcacggcgacccctaccgggaggagagcagcagcaagcaaggagccggcctcgctttgggcaggctgctgggcgggggccgggcgtgcgggcgccccgggagcggggagaactcggcggcgggcggcgcgggtcaccaccatcaccaccacgcgcaccaccaccaccatcccaagtgcctgctcgctggggacccgccgccgccgccgccgcctggcctgccctgctctggggccctgcgcggcttccctctgctctccgtccccccggaagaggcgtccgccttcaagcacgtggagcgcgccccgcccgcagccgccgcgctgccaggagcgcgttatgcgcagctgccccctgcgccggggttgcccctcgagcgctgcgcgctgccgcccctcgacccgggcggtctcaaagcctatccgggtggtgagtgcagccacctgcccgccgtcatgccggcctttacagtctacaacggggagctgctctacggctcaccggccaccaccgcttattacccgctcaaattgcacttcggcgggctgctgaagtatccggagtccatctcctacttcagcgggcctgcagcggccgccctaagccccgccgagctggggtcgctggccagcatcgaccgagagatcgccatgcacaatcagcagctgtccgagatggctgccgggaagggtcgcggacgcctggactcggggacgttgccaccggccgtcgcggcggcgggaggcaccgggggcggcggcagcggaggcagcggcgcaggtaagcccaagaccggccacctgtgcctctactgtggcaagctgtactcgcgcaagtatgggctcaagatccacatgcggacgcacacgggctacaagccactcaagtgcaaagtctgtctgcggcccttcggcgaccccagcaatctcaacaagcacatccggctgcacgccgagggcaatacgccctaccgctgcgagttctgcggcaaggtacttgtgcgccgccgggacctggagcgacatgtcaagtcccgccaccctggccagagtctgctcgccaaagcgggcgacggcccgggtgccgagcccggctatcccccggagcctggggatcccaagagcgacgacagtgacgtggacgtctgcttcacagacgaccagagcgaccccgaggttgggggcggcggggagcgcgacttgtaacgagtcttcccgggaaggggcggggtgaggacagagaggagtcgagggtttattctcgcagtagaggaactcctggtggtgggaagagggacccaatggacaaaaccgtttttgtttttgagagggcgccagatttgaaacagtgagaggtcccacatctggtgctgaaactcagagcaacagttcagaggtggcgtaaatctggccacctggagagctcgagtgccaccagtacctccgcaccccgggcctctggacttcttggatgagctcaccctgaaccgcccaggcggtctgctcttggtgttcagaatcacatcaatgcgaacgtcacagcgccttcgagggcgcagattttaactgccacgtatttttaagttgtacttttctgtggaggaaattgtgccttttgaaacgacgttttgtgtgtgtatttcacgttagcatttcattgcataggcaaaacactagtcacaattgggtagatgtgacatccatatacttgtttacattttatctgttctcatgtcaaagactactccttgccccattgaatatatagtggtagcaggtgtacaaattggtcaagttgcaattatttatgagaaaataatgataaatgtaaaatatctaaagcatgaatctaagagcacgcaatatataattttaaagaaaatattctatttggtagaatacaaatgtggtgtgtgttgttttataatgactgctgtacagtgggtatagtattttggttttggttccagattgtgcaatctttaagaaaaataaagatacaaacgagagttttgttcacttagt

SEQ ID NO: 800 - DNA, 2221 bp, Homo sapiens
aattccctaccctcgacctgtcgatgccccgcggccccgcccgccctcttaagcctggctcagccctcagggcccgcccgaagtctaccgagcccgagtggcctaccgagcccgagtggccccgcagcgtccaggaggcgcccgctccgcggtggcgctcttggaggtggtgtcggagagccgccgagcgtgcggtcccgggatggctctaccccggccaagtgaggccgtgcctcaggacaaggtgtgctacccgccggagagcagcccgcagaacctggccgcgtactacacgcctttcccgtcctatggacactacagaaacagcctggccaccgtggaggaagacttccaacctttccggcagctggaggccgcagcgtctgctgcccccgccatgccccccttccccttccggatggcgcctcccttgctgagcccgggtctgggcctacagagggagcctctctacgatctgccctggtacagcaagctgccaccgtggtacccaattccccacgtccccagggaagtgccgcccttcctgagcagcagccacgagtacgcgggtgccagcagtgaagatctgggccaccaaatcattggtggcgacaacgagagtggcccgtgttgtggacctgacactttaattccaccgccccctgcggatgcttctctgttacctgaggggctgaggacctcccagttattaccttgctcacccagcaagcagtcagaggatggtcccaaaccctccaaccaagaagggaagtcccctgctcggttccagttcacggaggaggacctgcacttcgttctgtacggggtcactcccagcctggagcacccagccagcctgcaccatgcgatttcaggcctcctggtccccccagacagctctggatctgattctcttcctcaaactctggataaagactcccttcaacttccagaaggtctatgcctcatgcagacggtgtttggtgaagtcccacattttggtgtgttctgcagtagttttatcgccaaaggagtcaggtttgggccctttcaaggtaaagtggtcaatgccagtgaagtgaagacctacggagacaattctgtgatgtgggagatctttgaagatggtcatttgagccactttatagatggaaaaggaggtacggggaactggatgtcctatgtcaactgtgcccgcttccccaaggagcagaacctagttgctgtgcagtgtcaagggcatatattttatgagagctgcaaagagatccatcagaaccaagagctccttgtgtggtatggagactgctatgagaaatttctggatattcctgtgagccttcaggtcacagagccggggaagcagccatctgggccctctgaagagtctgcagaaggctacagatgtgaaagatgtgggaaggtatttacctacaaatattacagagataagcacctcaagtacaccccctgtgtggacaagggcgataggaaatttccctgttctctctgcaaacgatcctttgagaagcgggaccggcttcggatccacattcttcatgttcatgagaagcaccggcctcacaagtgttctacatgtgggaaatgtttctctcaatcttccagcctaaacaaacacatgcgagtccactctggagacagaccataccagtgtgtgtattgtactaagaggttcacagcctccagcatactccgcacacacatcaggcagcactccggggagaagcccttcaaatgcaagtactgtggtaaatcttttgcatcccatgctgcccatgacagccatgtccggcgttcacacaaggaggatgatggctgctcatgcagcatctgtgggaaaatcttctcagatcaagaaacattctactcccacatgaagtttcatgaagactactagccctgccaggcacaatgactcacgcctgtaatcccagcactttgggaggcagaggtgggtggatcactcaagtccaggagttcgagaccagcctgggcaacatggtgaaatcctgtctctaccaaaaaaatacaaaaatcagctgggggtggtggcacatgcctgtggttccagccactcaggaggtcgaggtggcaggatggtttgagcacaggagacggaggttgctgtgagctgagatcgccccactgcttttcaacctgggtgacagaaccagaccctgtctcaaaaaaaaaaaaaaaa

SEQ ID NO: 801 - DNA, 2627 bp, Homo sapiens
ggcatcaaggagtacgagtgcaaggagtgccacggcaggttcgcgcagaaggtcaacatgctcaagcactgcaagcggcacacggggattaagattttcatgtgtgaattgtgtgggaagacattcagcgagaggaacaccatggagacccacaagctcatccacacagtgggcaagcagtggacgtgctccgtgtgcgacaagaagtacgtgaccgagtacatgctgcagaagcacgttcagctcacacacgacaaggtggaggcgcagagctgccagctgtgcgggaccaaggtgtccaccagggcctccatgagccgacacatgcggcgcaagcaccccgaggtgctcgcggtgaggatcgatgacctggaccacctcccggagaccaccaccatcgacgcctcctccattggcatcgtccagcctgagctgactctggagcaggaggatttggccgaagggaagcacgggaaagctgccaagcgaagtcacaagagaaagcagaagccagaagaggaggcgggtgctccggtgcccgaggacgccaccttcagcgaatactcagagaaagagacggagttcacaggcagtgtaggcgacgagaccaattccgcagtacagagcattcagcaggtagtggtgaccctgggtgacccaaatgtgaccacaccatcgagctcagtcggcttgaccaacatcaccgtgacccccatcaccactgcggccgcgactcagtttaccaatctccagccggtggccgtggggcaccttaccacccctgaacgccagttacagctggacaactcaatcctgaccgtgacctttgataccgtcagcggctctgccatgttgcacaaccgccaaaatgacgtccagatccacccccagccggaagcctcgaacccacagtctgtggcccatttcatcaacctgacgaccctggtcaactccatcacgcccctggggagccagcttagtgaccagcacccgctcacgtggcgggcagtgccccagactgacgtcttgccacccccgcagccgcaggcacccccacagcaggcggcccagccccaggtgcaggcggagcagcagcagcagcagatgtacagctactgagctgcgttccgggagactcggggcaagaactgcagagggatgtttgggatttgtttagatgtgtttgctggataccaaacaaacaaaaagtcatacattgcaatgtaaggttgacttagctttgcagagtatctccagatcccccgccagcaaccattacggtctgtcagcttaactctagaagggacctctggcaggccagagttttaaactggatggggctccacaccatgccttaccaaggcagtaagtcctgggccggggccgcatctgcctccccttacagaaccagtgttcgcccgacacagggttcgggaaagtgaagctgagagagaagcaggattttaagaggcaggagataagttattaggaacacaaatggttcattttcttttttcttttagagctcggttcctatgagaacacagacagtattcacaggtggcagcaggcagcagggaacattttctcctcacttctggatttttttgcaagcgagcacatagaagttaaagtaacgtgtattctctttgaactaggagtggagtcggttcttatacaactatgggctgaaaccatgaggcgtgctgagccgcacctgatcctgcaaccttcgaggtcatcacggtcatcatgtgcaaggggtcacgtgaggtcactgactccagctcaaaaggcatcttagtaatatccatgaatcgatttccaatagagtttttttccttttttttttttaactttatttcaaacatacattatgtgttcaagactgttatggccaatattgtgttttagttttatgttaacatgataaagtcatgtgcactgtaggaccatctgtccctgtccacccttcacagctgcccagatgcagagggtcgcgcggctgtgtgtgaggagtgagcctccctgctgcccccaggggctcctccgggttgtctcaggattctctgcaatccaaatgtatccattctggctgaagcccagccagaatcccgagtggaagaaacgggggaaaagtcatattttccttctgtttaaacttcaattccaaaggtgcacagatgtattcataaaggaagacattagatccagccattgtggccaccaggctctgtggacccatctcagtggagaattcgttttggacccgtggctccgtgcagctgtggactcgagtgccatccactggtgtgagtcttgcggggaggccacaggaaaacgttctgtgccaagtgccgcctcgctgtgtccggcatgggactgcgctggagggtccggcgtggaaggcagacctcctgtacctctatcgttcccatttgtggcatccaaaggcggaaggctcatggcttccccactagaggcggcgtcttgggctttcccattggattgtgaaaggcattaagactgtttggagatgttggctgtatttcctgtcacatcaggttgtatgatgacgaataaaaggtgctgtgacccgtgttttcaaaaaaaaaaaaaaaaaaaaa

SEQ ID NO: 802 - DNA, 8738 bp, Homo sapiens
ctgacaatgctggggagatgaagatagtgtgtggctgcttctggactcaaggaggaggagagagattccgcgagccgacaccatgcgatccaaggcgagggcgaggaagctagccaaaagtgacggtgacgttgtaaataatatgtatgagcccaaccgggacctgctggccagccacagcgcggaggacgaggccgaggacagtgccatgtcgcccatccccgtggggccaccgtcccccttccccaccagcgaggacttcacccccaaggagggctcgccgtacgaggcccctgtctacattcctgaagacattccgatcccagcagacttcgagctccgagagtcctccatcccaggggctggcctgggggtctgggccaagaggaagatggaagccggggagaggctgggcccctgcgtggtggtgccccgggcggcggcaaaggagacagacttcggatgggagcaaatactgacggacgtggaagtgtcgccccaggaaggctgcatcacaaagatctccgaagacctgggcagtgagaagttctgcgtggatgcaaatcaggcgggggctggcagctggctcaagtacatccgtgtggcgtgctcctgcgatgaccagaacctcaccatgtgtcagatcagtgagcagatttactataaagtcattaaggacattgagccaggtgaggagctgctggtgcacgtgaaggaaggcgtctaccccctgggcacagtgccgcccggcctggacgaggagcccacgttccgctgtgacgagtgtgacgaactcttccagtccaagctggacctgcggcgccataagaagtacacgtgtggctcagtgggggctgcgctctacgagggcctggctgaggagctcaagcccgagggccttggcggtggcagcggccaagcccacgagtgcaaggactgcgagcggatgttccccaacaagtacagcctggagcagcacatggtcatccacacggaggagcgcgagtacaaatgcgaccagtgtcccaaggccttcaactggaagtccaacctcatccgccaccagatgtcccacgacagcggcaaacgcttcgaatgtgaaaactgcgtgaaggtgttcacggaccccagcaaccttcagcggcacatccgctcgcagcacgtgggcgctcgggcccacgcctgccccgactgcgggaagaccttcgccacgtcctccggcctcaagcagcacaagcatatccacagcacggtgaagcctttcatatgtgaggtctgccacaagtcctacacgcagttctccaacctgtgccggcacaagcggatgcacgccgactgccgcacgcagatcaagtgcaaggactgtggccagatgttcagcactacctcctccctcaacaagcaccggcgcttctgcgagggcaagaaccattacacgccgggcggcatctttgccccgggcctgcccttgacccccagccccatgatggacaaggcaaaaccctcccccagcctcaatcacgccagcctgggcttcaacgagtactttccctccaggccgcacccggggagcctgcccttctccacggcgcctcccacgttccccgcactcacccccggcttcccgggcatcttccctccatccttgtacccccggccgcctctgctacctcccacatcgctgctcaagagccccctgaaccacacccaggacgccaagctccccagtcccctggggaacccagccctgcccctggtctccgccgtcagcaacagcagccagggcacgacggcagctgcggggcccgaggagaagttcgagagccgcctggaggactcctgtgtggagaagctgaagaccaggagcagcgacatgtcggacggcagtgactttgaggacgtcaacaccaccacggggaccgacctggacacgaccacggggacgggctcggacctggacagcgacgtggacagcgaccctgacaaggacaagggcaagggcaagtccgccgagggccagcccaagtttgggggcggcttggcgcccccgggggccccgaacagcgtggccgaggtgcctgtcttctattcccagcactcattcttcccgccacccgacgagcagctgctgactgcaacgggcgccgccggggactccatcaaggccatcgcatccattgccgagaagtactttggccccggcttcatggggatgcaggagaagaagctgggctcgctcccctaccactcggcgttccccttccagttcctgcccaacttcccccactccctttaccccttcacggaccgagccctcgcccacaacttgctggtcaaggccgagccaaagtcaccccgggacgccctcaaggtgggcggccccagtgccgagtgcccctttgatctcaccaccaagcccaaagacgtgaagcccatcctgcccatgcccaagggcccctcggcccccgcatccggcgaggagcagccgctggacctgagcatcggcagccgggcccgtgccagccaaaacggcggcgggcgggagccccgcaagaaccacgtctatggggaacgcaagctgggcgccggcgaggggctgccccaggtgtgcccggcgcggatgccccagcagcccccgctccactacgccaagccctcgcccttcttcatggaccccatctacagcagggtagaaaagcggaaggtcacagaccccgtgggagccctgaaggagaagtacctgcggccgtccccgctgctcttccacccccagatgtcagccatagagaccatgacagagaagctggagagctttgcagccatgaaggcggactcgggcagctccctgcagcccctcccccaccaccccttcaacttccggtccccacccccaacgctctccgaccccatcctcaggaagggcaaggagcgatacacgtgcaggtactgtgggaagatcttccccagatcagccaatctcaccagacacctgaggacgcacactggggagcagccgtacaggtgtaagtactgcgaccgctccttcagcatctcttcgaacctccagcggcacgtccggaacatccacaacaaggagaagcctttcaagtgccacctgtgcaaccgctgcttcgggcagcagaccaacctggaccggcacctcaagaagcacgagcacgagaacgcaccagtgagccagcaccccggggtcctcacgaaccacctggggaccagcgcgtcctctcccacctcagagtcggacaaccacgcacttttagacgagaaagaagactcttatttctcggaaatcagaaactttattgccaatagtgagatgaaccaagcatcaacgcgaacagagaaacgggcggacatgcagatcgtggacggcagtgcccagtgtccaggcctagccagtgagaagcaggaggacgtggaggaggaggacgacgatgacctggaggaggacgatgaggacagcctggccgggaagtcgcaggatgacaccgtgtcccccgcacccgagccccaggccgcctacgaggatgaggaggatgaggagccagccgcctccctggccgtgggctttgaccacacccgaaggtgtgctgaggaccacgaaggcggtctgttagctttggagccgatgccgacttttgggaaggggctggacctccgcagagcagctgaggaagcatttgaagttaaagatgtgcttaattccaccttagattctgaggctttaaaacatacactgtgcaggcaggctaagaaccaggcatatgcaatgatgctgtccctttccgaagacactcctctccacaccccctcccagggttctctggacgcttggttgaaggtcactggagccacgtcggagtctggagcatttcaccccatcaaccacctctgacgggctgggcagccgggggccggtggccagagcgagggcaccagccacgaaggacggaggcgggcggggccccggagaaccctgtccctgcgtgtggccactcctcagcatcctccccacccaccatggttcattccgacttttccaatggaaactcagatcccaaaagtccctaaagcagtcgtagagtctcaccatctccaaggattggtcttgagaacactgttcagtgacggccatgcaggtggccgtccaaagacagccaacggagctgcctcgcagaatcagccagtgggcaggtggacgctctgctgagacagaagctggtggccactgccgggtgcccgcgtggggtcgcggaagggaatggatagactggtgtgctcaaaagagagagatcactcaaatgatttttataatgaaatgacaagaataacccttttggtaaccgtattgactgcagagtctatttaagcatgtggttttaaaaatagacagtattttttaaaaatcaaaaaatgacttgcaaattgttttttaaaagtaattttgcattgctttgaaatttgagctcatttgcaaacccgagtctgcctgggaacccgcactgtgcctgggtgtattctttatactgtagataatggagaaattttctatctctgtccctatttgtataagccaaggtgatgctgggtgccccgaggcagaacaagaggcgcggggccacacccgtgaaccatgcagacggccgaagaagtcttaggcagggcgccctgggctgcaggcctgcccgaggctgggatgggaagtgtgcctgccctcgtgtgacatggaattggtgtcaggaccgccacgtggccttcagaggaatccacaggtccccacccaagatccctcaattatatggggaagtcgagggcctgtggcttggatccgccatgcagagatgtggccgggcacccatcttccttccctcctctgtccctgcctcggccaccccacgcgggaacccagcgccgtcctctgaaggcagggccttggccacgtcctgggtctcccacctcccacctgaccccagcggctccggtgtcctccacgtggctgccctggggagcaatcccagcggatcgctccgggccaccaagccgcacctgtgcctgagactccggatggacgacacagtcgtcacgtcgctcttcctgcgggttcttggcgagacacagcttgagaacagaagggcgtcgggggaacctgccgcaaggagcagagacagcacagccccccgggcccagccgcctccctctcttgggacgcaacttcttccccactcggatgggctttaaattattcccataggggccaatttcaaataataatttttttccctgatggaatttaccttaatctgtatataacttgtaattttttctaattcatttcttttcttattttatttcctccttaacagtatttttggcattagacattcttattgtgaagaaataatgttaatataagtatctggtgaaggaccaaaaccgtgtgataaggttgtgtgtcgtgtgggagtggggcgattttttatgtgccaaatacccccgtcccccccatgaatcctgctgtccctgctgccgtttaccagacaatcatatgtttttgttaaatttgcgtttcagttacatttgcatttaagacaagtgttctatttatttcttgtattgtttggaagaaaaaatgatgatagagtcccaaaaagaagagaaaaaaaatgcccaagttgccctttaaaaaaaaagagcgtaaatacaaacaggagtggtgcaagccgccttggtgtgggtttgtgtcacgtgtggacatctcctcaggctttgtgtcacgcgtggacatctcctcaggctgtccccagcggtgacgggaggtgtcctggctgctccaggacaaaagacaatcgtctctgtgggtgccgggtggtccaggcttgcactgaagacgtgccacggggaggctcctgcaggaggctcaacccgacggatcacagtgaaagggattcctcccacgccagatctgcacaacgaggcaagacaggacccacctgtgcgtgcgctggggccatggggtggccccgccggggcagcgggggagctgcctgcagaagagccagctggcgtgtcgggaaggatccaggatctgcaaacacaactgctcaggccttctcacgcgtttccacaacatcccctgggtcagacccaccaggtaccccgtaggaatttccagtttcccttgatctagatgggattcttataaaaattcaacctcagacataaacaccccatttctgtaaacccaaattatatggtttcttctgcgaaagagtaaggtgtgtgcttttttttttttgcaatatgaccccgtctctctgaagtgggacattcggacggatggagccctcagcgtgtcttttcagcaggagcagaaccgatgagagccgcccttaccgttggtctccggatcccccagtcccatcccgccgttttcggctgtcttcctaaccgtcctgtcttctcttggcgctctttccttccacctttcccaagagtcctggttgcacgttttaagtcatatattttcgtccccctgaaaatgatggcaagcccagtttctcctgagcattcagacccccaggccccagcacttggcgttttcaggaggccctgttcttagagcccctgacaaaggcagcacttatttcctgggctggtgcgccccaaaacacggccccgacacttagtgtggccccaggccccagcgagcctcgccctcccagttttgctctgcccagcagtgttggtgcccagagatgacaagggccagggagcctggcccgggtgtgagaattcagagattctggcctccagctgtcaccacaccgtaacggggccatgtaactgtgcagcatggacagggatgcgacggggcagctggctgtgtccatggccaggtggccagggtcagggctgcaagccaggggtccagggcccttccgttcagcccaaatgctgccccaatgctaactccttggattgtcaacccccatcccccaaatggaaattccgaaggaggcctcctcgcacctgccctccgctgctcctcagaccccagcccccagcgagccgacgtccccacccgttcctgctctcatccccaggttgggcacgtggggttcctcctctgtgggcctggcagacccttcatgagtgggacccaagatatcactgacttcaacccagaggatcgagcccctgcaccctgcctggggccctggggtgtggagcagtggctggggtgggcgtggtgtggcctgagagactgcccagctggagaggccttcctttacaaggccacgcgtgcagctgtcccatccagaccccgactggccaagacctccacgtccccagagtccagccctggaaattccaagggccctggcgtcctctgccttccccgcttccccatgagcgtctgcaaaacacttgcctgaatacatatcacgtattttagactcgaagcctcaaagcactggattgtggtcccctgccccctctgtcccgtccccctgcccaagtgactgaaacctactgagctatattcactgtgctgtcctagggggagggagagcagagctcgcccctgcactgcagccttgtgggggagggcaaggctctcctcccagccagggacgccaggacatagctgctcctggtcagtggaggtcagccgggtatcaaaagccatgaaactgtgtctctgtagcaatgagtgatactgtgacaaaaccatccttgcattcttcctagaagagttcctctgctccttccattccatttttgtgtttgttttgttcttttctgtcactgatccgtattaccacttttggaaaaaaataaataaataaataaataaaaggcagcttgagtttccaaacgtgtgattcacttgtgaacaaaagtcattctaacaattgccttcagcgtcacgtgcattgccactgcgctttcggcacgagggatgctgagccctggtgtcagagtcgtaatttaaagcgtgtgtgtatatggactttgtcccttaaggtcgatataaagaatcctcgcagaatcacagacctgtgccgcccgccaccttctgccattgttacattacagatttggtttagttttgttttgttttgttttttcttttagaactgtatagtattgaaaaagaaatcaaatgtaaatgtctggttttcatataatgtttaaaaagaccattgagaaggaggctggcgctcgccccatgtcccccttgattgtaaattgcttctgttctgtttataagtaaactgtgcatgactcctgcttagcggtcattatcgtgtctgttggtgaaatttttattaaaaggaaaattctgtagatgcacttattgaatatgtgattaggatctacgtctgagactaggagtcctgaactgctgacgcgaaagaggcgcagttcccaattaatacggaaatcgctgtgggagaagaatgaaataagacgtgaagtgtaggaaatcatgaaaagaacaattttgcaaattgcattctgatgcttgtgatgaacacaaatgtacttgtgtagagacatttccttaagagaaagcctaggagaagccgatttggaggttaatgctgtagaataggactgtataccaaatgtaatctttccaatgctccaatgaatttatacatgagattgatatgcaataaatctgtgtgcttttctaaaaaaaaaaaaaaaaa

SEQ ID NO: 803 - DNA, 7970 bp, Homo sapiens
gtaaaagtgacattctaaatgttcctcactctgcgaggcttattttttagggactttgctataattctgaaagacttagttttacagtacatctgaaagtaggagttttcagaagtatggctcttgggataaatttagattcttaattgtgaagctctgttaccacttgttagaaggcaggtcagctcacctgcttggggaggtaaatatatgaatgcactctcgagtaatttaatggagccctacctcaatgtacagaatgacagtatcacagatcaagaatggagtacgagtgattttcggctatggtgggggtaggtaggtcacttgtcccctgttgtctcttactatttgtaaagtgaagactatgattagtctttttgatcgggatggtttgagatgaataaagaataggcaggcaatttggatactttaggcttttcaagaacattagtaacattttttcttagatatttctcctaatacaatgagtgttgtgaaataacatggcagttattgttgagagaaaagccttcccagttatgtattgagtccttaggcgttttgaccttccctccactcttacagaacttggtggaaggggccactatgttttctacctccttccgtgcctttcacaaagccacatcctgcaccgtctacccttctctgtggatatttttccgcttggcaatttcctttcctgaggcacccacttgggacatctgaatctccatctccatgttgatggcccgtttgtgcttggacgtgttcttccacttgagactgagggttcatgtaatcaaagaagtttctttgttgtgtgtatctttacagaacacaacaggaattgaaaatgaatcagaacactactgagcctgtggcggccaccgagaccctggctgaggtacccgaacatgtgctgcgaggacttccggaggaagtgaggcttttcccttctgctgttgacaagacccggattggtgtctgggccactaaaccaattttaaaaggcaaaaaatttgggccatttgttggtgataagaaaaaaagatctcaggttaagaataatgtatacatgtgggaggtgtattacccaaatttgggatggatgtgcattgatgccactgatccagagaagggaaactggctgcgatatgtgaattgggcttgctcaggagaagagcaaaatttattcccactggaaatcaacagagccatttactataaaactttaaagccaatcgcgccgggcgaggagctcctggtctggtacaatggggaagacaaccctgagatagcagctgcgattgaggaagagcgagccagcgcccggagcaagcggagctcccccaagagccggaaagggaagaaaaaatcccaggaaaataaaaacaaaggaaacaaaatccaagacatacaactgaagacaagtgagccagatttcacctctgcaaatatgagagattctgcagaaggtcctaaagaagacgaagagaagccttcagcctcagcacttgagcagccggccaccctccaggaggtggccagtcaggaggtgcctccagaactagcaacccctgcccctgcctgggagccacagccagaaccagacgagcgattagaagcggcagcttgtgaggtgaatgatttgggggaagaggaggaggaggaagaggaggaggatgaagaagaagaagaagatgatgatgatgatgagttggaagacgagggggaagaagaagccagcatgccaaatgaaaattctgtgaaagagccagaaatacggtgtgatgagaagccagaagatttattagaggaaccaaaaacaacttcagaagaaactcttgaagactgctcagaggtaacacctgccatgcaaatccccagaactaaagaagaggccaatggtgatgtatttgaaacgtttatgtttccgtgtcaacattgtgaaaggaagtttacaaccaaacaggggcttgagcgtcacatgcatatccatatatccaccgtcaatcatgctttcaaatgcaagtactgtgggaaagcctttggcacacagattaaccggcggcgacatgagcggcgccatgaagcagggttaaagcggaaacccagccaaacactacagccgtcagaggatctggctgatggcaaagcatctggagaaaacgttgcttcaaaagatgattcgagtcctcccagtcttgggccagactgtctgatcatgaattcagagaaggcttcccaagacacaataaattcttctgtcgtagaagagaatggggaagttaaagaacttcatccgtgcaaatattgtaaaaaggtttttggaactcatactaatatgagacggcatcagcgtagagttcacgaacgtcatctgattcccaaaggtgtacggcgaaaaggaggccttgaagagccccagcctccagcagaacaggcccaggccacccagaacgtgtatgtaccaagcacagagccggaggaggaaggggaagcagatgatgtgtacatcatggacatttctagcaatatctctgaaaacttaaattactatattgatggtaaaattcaaactaataacaacactagtaactgtgatgtgattgagatggagtctgcttcggcagatttgtatggtataaattgtctgctcactccagttacagtggaaattactcaaaatataaagaccacacaggtccctgtaacagaagatcttcctaaagagcctttgggcagcacaaatagtgaggccaagaagcggagaactgcgagcccacctgcactgcccaaaattaaggccgaaacagactctgaccccatggtcccctcttgctctttaagtcttcctcttagcatatcaacaacagaggcagtgtctttccacaaagagaaaagtgtttatttgtcatcaaagctcaaacaacttcttcaaacccaagataaactaactcctgcagggatttcagcaactgaaatagctaaattaggtcctgtttgtgtgtctgctcctgcatcaatgttgcctgtgacctcaagtaggtttaagaggcggaccagctctcctcccagttctccacagcacagtcctgcccttcgagactttggaaagccaagtgatgggaaagcagcatggaccgatgccgggctgacttccaaaaaatccaaattagaaagtcacagcgactcaccagcatggagtttgtctgggagagatgagagagaaactgtgagccctccatgctttgatgaatataaaatgtctaaagagtggacagctagttctgcttttagcagtgtgtgcaaccagcagccactggatttatccagcggtgtcaaacagaaggctgagggtacaggcaagactccagtccagtgggaatctgtcttagatctcagtgtgcataaaaagcattgtagtgactctgaaggcaaggaattcaaagaaagtcattcagtgcagcctacgtgtagtgctgtaaagaaaaggaaaccaaccacctgcatgctgcagaaggttcttctcaatgaatataatggcatcgatttacctgtagaaaaccctgcagatgggaccaggagcccaagtccttgtaaatccctagaagctcagccagatcctgacctcggtccgggctctggtttccctgcccctactgttgagtccacacctgatgtttgtccttcatcacctgccctgcagacaccctccctttcatccggtcagctgcctcctctcttgatccccacagatccctcttcccctccaccctgtcccccggtattaactgttgccactccgccccctcccctccttcctaccgtacctcttccagccccctcttccagtgcatctccacacccatgcccctctccactctcaaatgccaccgcacagtccccacttccaattctgtccccaacagtgtccccctctccctctcccattcctcccgtggagcccctgatgtctgccgcctcacccgggcctccaacactttcttcttcctcctcttcatcttcctcctcctcttcgttttcttcttcatcttcctcctcttctccttctccacctcctctctccgcaatatcatctgttgtttcctctggtgataatctggaggcttctctccccatgatatctttcaaacaggaggaattagagaatgaaggtctgaaacccagggaagagccccagtctgctgctgaacaggatgttgttgttcaggaaacattcaacaaaaactttgtttgcaacgtctgtgaatcaccttttctttccattaaagatctaaccaaacatttatctattcatgctgaagaatggcccttcaaatgtgaattttgtgtgcagctttttaaggataaaacggacttgtcagaacatcgctttttgcttcatggagttgggaatatctttgtgtgttctgtttgtaaaaaagaatttgcttttttgtgcaatttgcagcagcaccagcgagatctccacccagataaggtgtgcacacatcacgagtttgaaagcgggactctgaggccccagaactttacagatcccagcaaggcccatgtagagcatatgcagagcttgccagaagatcctttagaaacttctaaagaagaagaggagttaaatgattcctctgaagagctttacacgactataaaaataatggcttctggaataaagacaaaagatccagatgttcgattgggcctcaatcagcattacccaagctttaaaccacctccatttcagtaccatcaccgtaaccccatggggattggtgtgacagccacaaatttcactacacacaatattccacagactttcactaccgccattcgctgcacaaagtgtggaaaaggtgtcgacaatatgccggagttgcacaaacatatcctggcttgtgcttctgcaagtgacaagaagaggtacacgcctaagaaaaacccagtaccattaaaacaaactgtgcaacccaaaaatggcgtggtggttttagataactctgggaaaaatgccttccgacgaatgggacagcccaaaaggcttaactttagtgttgagctcagcaaaatgtcgtcgaataagctcaaattaaatgcattgaagaaaaaaaatcagctagtacagaaagcaattcttcagaaaaacaaatctgcaaagcagaaggccgacttgaaaaatgcttgtgagtcatcctctcacatctgcccttactgtaatcgagagttcacttacattggaagcctgaataaacacgccgccttcagctgtcccaaaaaacccctttctcctcccaaaaaaaaagtttctcattcatctaagaaaggtggacactcatcacctgcaagtagtgacaaaaacagtaacagcaaccaccgcagacggacagcggatgcggagattaaaatgcaaagcatgcagactccgttgggcaagaccagagcccgcagctcaggccccacccaagtcccacttccctcctcatccttcaggtccaagcagaacgtcaagtttgcagcttcggtgaaatccaaaaaaccaagctcctcctctttaaggaactccagcccgataagaatggccaaaataactcatgttgaggggaaaaaacctaaagctgtggccaagaatcattctgctcagctttccagcaaaacatcacggagcctgcacgtgagggtacagaaaagcaaagctgttttacaaagcaaatccaccttggcgagtaagaaaagaacagaccggttcaatataaaatctagagagcggagtggggggccagtcacccggagccttcagctggcagctgctgctgacttgagtgagaacaagagagaggacggcagcgccaagcaggagctgaaggacttcagctacagcctccgcttggcgtcccgatgctctccaccagcggccccgtacatcaccaggcagtataggaaggtcaaagctccagctgcagcccagttccagggaccattcttcaaagagtagacactctggctgctccctgacagcacctgaagtgacctggaatcagtgaagccaaagggactggcagtctgccctgcagggagtaccgacctatcccagttgtgtgaggctgcgagagaaagggagtgcatgtgcgcgcgtgcatgtgtgcgtgcgtgtgtgttcacgtgttctcgtgcgggcgcgtgagtggtcttcaaacgagggtcccgatccccggggcggcaggaagggggccgactccacgctgtcctttgggatgatacttggatgcagctcttgggaccgtgttctgcagcccagccttcctgttggggtggggcctctcctactatgcaatttttcaagagctccttgaccctgctttttgcttcttgagttgtcttttgccattatggggactttggtttgacccaggggtcagccttaggaaggccttcaggaggaggccgagttccccttcagtaccacccctctctccccaccttccctctcccggcaacatctctgggaatcaacagcatattgacacgttggagccgagcctgaacatgcccctcggccccagcacatggaaaacccccttccttgcctaaggtgtctgagtttctggctcttgaggcatttccagacttgaaattctcatcagtccattgctcttgagtctttgcagagaacctcagatcaggtgcacctgggagaaagactttgtccccacttacagatctatctcctcccttgggaagggcagggaatggggacggtgtatggaggggagggatctcctgcgcccttcattgccacacttggtgggaccatgaacatctttagtgtctgagcttctcaaattagctgcaataggaaaaaaacaaattgggaaatgaaaaaaaaatgggaagattaaaaagcacagggggaagaagaagagatttcggaggccatcctgccaggggcggacggggctgactcctgctctctggaggacggtcagtccatgtctcggagaaacgggtgagctgagcttggcgtttggacccagttcagtgaggttcttgggttttgtgcctttggggcagaccccaggcaaggatgtctgagaccacttgggcgctgttttctcagctccaatttcaagagtgagctatcaaacccagagcggaaggagggagctctgatgagcacggtttgtcacacgataaagggattttttttttcagggctactacggttgatcttgcaactctgtaaatatgtatgtagacacttttaaaagcacgtatttatgtccctgactgtaaatgctccatttttaaagttttataacttgtgttatttaatgagtcagtcaatcggctgcagtatgggatctgataaggatctaggagaagggtctcatgcggaccctcacatgggcagaaaaatggtggtcattggccgacatcacagttttcctgtttcccacccagctaaaaaccgttgtttgctttaaattttcataaactggaatcctttcacccgctcctacagctaaccctcacaagcatgaagtgctgtggctgttccttatcctaatgatgcgcttttgtcccgtaaatgttaacactcatgaagcataccccggcctctcagttcttgagggcctccccaccgcagcagcaaggaaagctcacgaaccccaaacctggcaagtcacctgcagcccatggtgagctctgggaagtgtggttgaggccttggggtcactccttttttgcatgtgcaaatgtgctggtcacccttcaacgctcccagacggtcaggaaaactgttccaatcatgaaaaggggggatgattttgtaaaagtggcatttcctggtcagtggtggtcttcaagacgacagctctgtatctgccatgtgaagagaattaacaataaaagtgtgaagagcgattgtgaggaacaaaaaaaaaaaaaaa

SEQ ID NO: 804 - DNA, 4225 bp, Homo sapiens
gcagagggtgcggcccagaggaggccgcgggccgggaagggccgggcgggacgggaaacgttagggcagcggcccccggggtgagggggccgagcggacgggcagggccccgaggcgaactctgcccggatgaggaacaaagcagtggggcaggcgcgtgcgcccccagcgcagctggcaggttgggcagcccccttcccgaagcttctggacggaaggccccaggtgttccccgagatgccccaacccgtggcggggtgcacggccaccggccctcgggagaagttgggcggccccgggcgaccccggggacgagtggccgcgtcggtgcagcggttgtgagcaagatgtggtagcacgtgaccctggaacgcaaaccctgatgcctgttccccaccacccgagcgctcctttctctgatatttggccccaagccgatgcatcacaggatgaatgaaatgaacctgagtccagtggggatggagcagctgacttcatcctctgtgagcaatgccttgccagtctcaggaagtcacctgggattggctgcctcacccactcacagtgccatccctgccccaggcctcccagtggcaattccaaacctgggtccctccctgagctctctgccttctgctctgtctttaatgctaccaatgggtattggggatcgaggggtgatgtgtgggttacctgaaagaaactacaccctacctccaccaccttaccctcacctggagagcagttatttcagaaccattctacctggcattttatcttatttagctgacagaccacctccacagtacatccaccctaactctataaatgttgatggtaatacagcattatctatcaccaataacccttcagcactagatccctatcagtccaatggaaatgttggattagaaccaggcattgtttcaatagactctcgctctgtgaacacacatggtgcccaaagtcttcatcccagtgatggccatgaggtggccttggacacagcaatcactatggagaacgtttctagggttaccagcccaatttcgacagatggaatggcagaggagcttacgatggacggtgttgcaggcgagcattcccaaatcccaaatggctccagaagtcatgaacctctgtctgtggattctgtgagcaacaaccttgcagcagacgctgtaggacatggtggtgtgatacccatgcatgggaatggcctggagctccctgtggtcatggagacagaccacattgcaagtcgggtcaatggcatgtctgacagtgccctcagtgactccattcacactgtggccatgagcaccaactctgtaagcgtggcactctctacctcacacaaccttgcctccctagaatctgtttccctccatgaagttggcctcagcctagaacctgtggctgtctcctccatcacccaggaggttgctatggggacaggtcatgtagatgtatcttcagacagtctttcttttgtatcaccttcactgcaaatggaagactccaattcaaacaaggagaacatggcaaccttgtttacaatttggtgtactctgtgtgaccgcgcctatccctcggactgtcccgaacatggaccagtgacttttgttcctgacactccaatagagagcagagcaaggctttctctcccaaagcagcttgttctccgtcagtcaattgtgggagcagaagttggtgtatggactggagaaaccattcctgtgcggacttgctttggacctctaattggccagcagagtcactccatggaagtagcagaatggacagacaaggcagttaaccatatctggaagatataccacaatggtgtcctagaattctgcatcattacaactgatgaaaatgaatgtaattggatgatgtttgtgcgcaaagccaggaaccgggaagagcagaatttggtggcttatcctcatgatggaaaaatctttttctgcacctcacaagatatccctcctgaaaatgaactgcttttttattatagccgagattatgctcaacagattggtgttcctgaacacccagatgtgcatctctgtaactgtggcaaggagtgcaattcttacacagagttcaaagcccatctgaccagccacatccataaccatcttcctacccagggacatagcggcagccatgggccaagtcacagcaaagaaaggaagtggaagtgctcaatgtgcccccaagcttttatctctccttccaaacttcatgtccactttatgggtcacatgggtatgaagccccacaagtgtgatttctgtagcaaggcttttagtgatcccagcaacctgcggacccacctcaagatacatacaggtcagaagaactacaggtgtaccttgtgtgacaagtctttcacccagaaggctcacctggagtcccacatggttatccacactggggagaagaatcttaagtgtgattactgtgacaagttgtttatgcggaggcaggacctcaagcagcacgtgctcatccacactcaagaacgccagatcaagtgtcccaagtgtgataagctgttcttgagaacaaatcacttaaagaagcatctcaattctcatgaaggaaaacgggattatgtctgtgaaaaatgtacaaaggcttatctaaccaaataccatctcacccgccacctgaaaacctgcaaagggcccacctccagttcgtcagcaccagaggaggaagaagaggatgactcagaagaggaagatctagcagactctgtggggacagaagactgtaggattaacagtgctgtgtattcagcggatgagtctctttctgcacataaataaaaggaaaagaaacaagcaattttggatgaaaatgcaaatggaaaaatacacataaccagttatctactataatggtttttatataaaatggttcctgatttattttcagccagtaatcaaaacagactgggaatgaataaagcacttacagaagagtatcctaatgaaaacactttaaaacagattgggaaaactgagcatgtgtcctgttttaagtggtggactgggagggaagtgtcaacttctgaggtctttatttacatgataatctgggagatgcatttatgcctgaatcaaagctgccttctgctcaaacaaatcagatttatttcacattcttccattattccattttcctgctggtcctgtgacttggtaacattctaaacggtccttgccccatagccatcctgattgctgatagtgttttatgcagactcttgtgacttatactcaccacagaatggattgggacacagcagcataagtgtgctacttggcagctagtaagtttaaagcaggacctgccttaactgctcctggccacttggaagtttagggtagatcttgttttccaaagtttcggcaggtgcctggagggcaaataaaaaagcagcagtcagtcagtagtcagtgatggagagaacaagaggagagatgcctggcctctgcccaagaaattagctttgatggaagcctgagcaagtcacctggttattgtaacgtggagatctttgtaggtttagacatggctccctgtctccagtaaacatccagccattcagacaaagggggcctggagatacagagagcccaaataatgcctgctggattgtctcctgatgagtacatgtggactcacctgaggaagggaaggaagggaataatcttttatgtttcatttaccttatgaaaagtgttaaaacattgccaactcaaaataacattatttaatgcatgtgcaaagttaggtcttcccagttgtctcagtgctgaggaacctcatcagagaagcatggaagatgccaaaggatttttggaaggtaaagaaggctgaatagtgaccacatgggcctgttttcagggtcccagcttagttaagtcacccatgcacctggtcattgtgtctcccatgcacatccagcgtttctcagaagcagacccacccttaagttgacaggattgatggaacatgctctcctgctcaaggcacaacctctgggctggagtagaggactctggtgggaaggttttgctgctaatgtatttatggaatgaatgtatttcattcaaatctgtattcctctaggaaggattaaaattaaacttttttaaaatacaggaaaaaaaaaaaaaaaaaaaaaaaaaaaaaaaaaaaaaaa

SEQ ID NO: 805 - DNA, 2492 bp, Homo sapiens
gcgccccccgcgcccccgcagcaggaatggcaggaacggatccgggccgagcccgacccgggacgaggaggggctgagccgcgggggatcctggaatcggcagggaggtggggattctgggaggaaaactccatttcctccttccctgccggtttctcccctctaccctggcaccccaaatttcgatgtgccgcctgccgggcgctaagcgccggtgttgagagaggcggcggccgccgcgcccgggaaaatgctgggcatgtacgtgccggacaggttctccctgaagtcctcccgggttcaggacggcatggggctctacacggcccgcagagtgcgaaagggtgaaaagttcggaccctttgctggagagaagagaatgcctgaagacttggatgaaaatatggattacaggttgatgtgggaggttcgtgggagtaagggagaagttttgtacattttggatgctaccaacccacggcactccaactggcttcgcttcgttcatgaggcaccatctcaggagcagaagaacttggctgccattcaagaaggagaaaacattttctatttggcagttgaagatatagaaacagacacggagcttctgattggctacctggatagtgacatggaggctgaggaggaagaacagcaaattatgacagtcatcaaagaaggggaagttgaaaattctagaagacaatcaacagcgggcagaaaagatcgccttggctgtaaagaggactatgcttgtcctcaatgtgaatcgagttttaccagtgaggatattcttgctgagcatctccagacattgcaccagaaacccacagaggagaaagaatttaagtgcaagaactgtgggaagaaattcccagttaagcaggctttgcaaagacatgttcttcagtgcacagcgaaaagcagtctaaaggagtcttcgcgaagttttcagtgctctgtttgcaattcttccttcagttcagcatcgagttttgagcagcaccaggagacttgccggggggatgccaggtttgtgtgcaaggctgacagctgtggaaagaggctgaagagcaaggatgccctgaaaagacaccaggaaaatgtccacactggagatcctaagaaaaagcttatatgttcagtgtgcaataaaaagtgttcttcagcatcaagcctacaggaacatagaaagattcatgagatatttgattgtcaagaatgtatgaagaaatttatttcagctaatcagctaaaacgtcatatgatcacccactcagaaaaacgaccctataattgcgagatttgtaataagtctttcaagaggcttgatcaagtgggtgctcacaaagtaatacacagcgaagacaaaccttacaaatgcaaactttgtggaaagggatttgcccacagaaatgtttacaagaatcataagaagacccactctgaggagagaccgttccaatgtgaagaatgtaaagctttgttccggaccccattttctttacagagacacctgctaatacataacagtgagaggactttcaagtgccatcactgcgatgctacctttaagaggaaggatacattaaatgttcatgtccaggtggttcatgaaagacacaagaagtataggtgtgagctatgtaataaggcctttgttacaccttcagtgcttagaagtcataagaaaacacatacaggagaaaaggagaaaatctgtccatattgtggccagaaatttgccagcagtggtacactcagagttcatatccggagccacacaggtgagcgtccctatcaatgtccttactgtgaaaaaggattcagtaaaaatgatggactgaagatgcacattcgtactcacaccagggagaagccgtacaagtgctcagagtgcagcaaggccttcagccagaagcgaggcctggatgagcacaagaggacgcacactggagaaaagccttttcagtgtgatgtttgtgatttggcttttagcctgaagaaaatgctgattcgacacaagatgactcataatcccaatcgtcccctggcagaatgccagttttgccataagaagtttacaaggaatgactacctcaaagtgcacatggacaatatccatggtgtagctgacagctaataggggctgtaaaggaattaaactattcagaagggctcctaatatgaatcccagatttttatcacctgatcagcataacagaagtagccaaaagtgacttactggtctcatagttcttatttgcctacatttagagtctgtagatgcatatgcaaccaaaaaaaagtcttacttttaacaagaaatggtataaatggaaaaaaaatacaactccatagccttgcaaaatgcaacttgtgctctgtcttataaaaatggagaaaggagtcatggctctctttcttggccatccctctgtaatgaagtttataatatacttccctaataggcctttttaaaaaaaaaaaaa

SEQ ID NO: 806 - DNA, 2627 bp, Homo sapiens
gcacaatctctctctcacacacacacacacacacacacacacacacactcactcactctattttgtgctgtcgtaaaacccacgtgtccagccgggaagctgccagagcgtggaaccaaggagccaggacgcggcagcggccaagcgcagcagcccacggcggttgagtcgggcgcccaggtccgtccgcactctcgcgccctccgcgggcctcccaattttctcgcttgcaggtcgggaggtttccgggcggcacaatctctaggactctcctcccgcgctgctcaggggcatgtagcgcacgcagggcgcacactctcgcgcacccgcacgctcaccgagacacccgcgctggctggtctctcggccctgccggtgtcgcagctgccggtgttcgcgcctctagccgccgctgccgtcgccgccgagccgctgccccccaaggaactgtgcctcggcgccacctccggccccgggcccgtcaagtgcggtggtggtggcggcggcggcggggagggtcgcggcgccccgcgcttccgctgcagcgcagaggagctggactattacctgtatggccagcagcgcatggagatcatcccgctcaaccagcacaccagcgaccccaacaaccgttgcgacatgtgcgcggacaaccgcaacggcgagtgccctatgcatgggccactgcactcgctgcgccggcttgtgggcaccagcagcgctgcggccgccgcgcccccgccggagctgccggagtggctgcgggacctgcctcgcgaggtgtgcctctgcaccagtactgtgcccggcctggcctacggcatctgcgcggcgcagaggatccagcaaggcacctggattggacctttccaaggcgtgcttctgcccccagagaaggtgcaggcaggcgccgtgaggaacacgcagcatctctgggagatatatgaccaggatgggacactacagcactttattgatggtggggaacctagtaagtcgagctggatgaggtatatccgatgtgcaaggcactgcggagaacagaatctaacagtagttcagtacaggtcgaatatattctaccgagcctgtatagatatccctaggggcaccgagcttctggtgtggtacaatgacagctatacgtctttctttgggatccccttacaatgcattgcccaggatgaaaacttaaatgtcccttcaacggtaatggaagccatgtgcagacaagacgccctgcagcccttcaacaaaagcagcaaactcgcccctaccacccagcagcgctccgttgttttcccccagactccgtgcagcaggaacttctctcttctggataagtctgggcccattgaatcaggatttaatcaaatcaacgtgaaaaaccagcgagtcctggcaagcccaacttccacaagccagctccactcggagttcagtgactggcatctttggaaatgtgggcagtgctttaagactttcacccagcggatcctcttacagatgcacgtgtgcacgcagaaccccgacagaccctaccaatgcggccactgctcccagtccttttcccagccttcagaactgaggaaccacgtggtcactcactctagtgaccggcctttcaagtgcggctactgtggtcgtgcctttgccggggccaccaccctcaacaaccacatccgaacccacactggagaaaagcccttcaagtgcgagaggtgtgagaggagcttcacgcaggccacccagctgagccgacaccagcggatgcccaatgagtgcaagccaataactgagagcccagaatcaatcgaagtggattaacggattgactggttggaattaaactgcaaggaaagtcatgattaaatgtcacggacacttaagcaaaaccaaagatttcctctgagcaactttcaatcagtcccagaaaaccaaaagcagtaataaaataagtaagatgttaagagatattgatcctggcatggaagtcagaccaggaaagagattatttatttatgacttagggatgagacttatttcagtggacaactaacctgggatggtaaacattcccagtcccaccatgtattttgctttgtttctaaaaagctttttaaaaactgttatttaataccaaagggaggaatcgtatgggttcttctgcccaccgttgtgactaagaatgcacagggacttggttctcgttgcacctttttttagtaacatgtttcatggggacccactgtacagcccttcattctgctgtgtcagtttggcctggcctgacactggctgccccagcggggaccacggaagcagagtgagagccttcgctgagtcaatgctaccttcagccccagacgcatcccatttccatgtcttccatgctcactgctcatgcactttttacacggtttcttccaaacagcccggtcttgatgcaggagagtctggaaaaggaagaaaatggtttcagtttcaaaattcaaaggaaaaagttgaggacttattttgtcctgtcaagattgcaagaacatgtaaaatgtacggagcttcataatacgttatattgttccgaagcagctcgttgagaaacatttgttttcaataacattttagct

SEQ ID NO: 807 - DNA, 2504 bp, Homo sapiens
atcattcccttactcgaatgaattaaagtacaggattggggctaaataatgtgagtgccacgctctttctgaagctcttatatcaaggaacatgcattacaactttcctaatccctgcttccctcacttccagattgtgagatgtgtcagaacttcttcattgacagctgtgctgctcatgggccccctacatttgtaaaggacagtgcagtggacaaggggcatcccaaccgttcagccctcagtctgcccccggggctgagaattgggccatcaggcatccctcaggctgggcttggagtatggaacgaggcatctgatctgccactgggtctgcactttggcccctatgagggccgaattacagaagacgaagaggcagccaacagtggatattcctggctaatcaccaaggggagaaactgctatgagtatgtggatggaaaagataaatcctcggccaactggatgagaaccaaagccagagatccatccatgtccctcatgctgtctggccttttcaagtcaaaaatttctcagtcaacatgtggaacgcaatcactcctctcagaacttcccaggaccatctgcaagaaaacttctccaaccagagaatccctgcccaggggatcagaatcaggagcggcaatattctgatccacgctgctgtaatgacaaaaccaaaggtcaagagatcaaagaaaggtccaaactcttgaataaaaggacatggcagagggagatttcaagggccttttctagcccacccaaaggacaaatggggagctctagagtgggagaaagaatgatggaagaagagtccagaacaggccagaaagtgaatccagggaacacaggcaaattatttgtgggggtaggaatctcaagaattgcgaaagtcaaatatggagagtgtgggcaaggtttcagtgataagtcagatgttattacacaccaaaggacacacacaggggggaagccctacgtctgcagagagtgtgggagggctttagccggaagtcagacctcctcagtcaccagaggacacacacaggggagaagccttatgtctgcagagagtgtgagcggggctttagccggaagtcagtcctcctcattcaccagaggacacacaggggagaagccccagtctgcaggaaggatgagtaagtcattagtaataaaaccttatctcaatagccacaagaagacaaacgtgatcaccacacacttgcacaccccagctctgaggtggcttcagcgaaagtctgctaaccccttacattccccgagagtgtaaagagatcggaaataactaattaaacaaatccgccactttcatgactagagttgaggaagaacaggggatagttctgtaagtgttcgggggacgtcaacatgtgtggttgtttcccgcactgatcccctccattttttgtgttttgcctcctgttctaattaattttgtctccatacatatctgaaccccaagtgtgtacctcattcttcccttatcactgaaggaaggaagagtccagaagggccacagagaactcaaacgttcagttcaagtctccacaggaattcaaccccagaaagacataaacttggagtccatctggtttaattattggagaatcgattcccaagtccaggaagagaaatgtagggttttacagagtcgcagcaggaaagagagctccctggtctcctgggaagtgtgacctcttctaatggacccctctcctctgctgccatactcccccttggctccccctgtctcctctcctgatttcctccaatctctgtagccccagaagtgaacgccagacaggaacacgcatgtgtgtatatatgtgttcacgtgtgctatgtgtgttaagcctgcatgcatgggtgtgggggtatgtgccctctgtgtacgtatctgtgtgagtgtgggggtttcaagggtgtattaggaataacgctcaaaatcctaaggaaattgaatactctgagagaagagagacagaccctctcatactgttttatattgttttatactcagaaaaggaaaaagaagcaaaactaaaggcaggtagcctggcgcctaggaaccagacctgaaaccaaggaaccagacccgaaaccaggcctgggccggcctgacctaagcctggtagttaaaattcgacccctgacctagcaactgatgttatctatagattatagaaagacattgtgaaacttcccggtctgttctgttccactctgaccatcggtgcatgcagcccctgtcacctaccccctgcttgctcaatcgatcacgaccctctcacgtggacccccttagagttgtgagcccttaaaagggacaggaattgctcactcggggagctcggctcttgagacagcagtcttgctgatgctcctggccgaataaaccgcttccttctttaaaaaaaaaaaaaaaaaaaaaaaaaaaaaaaaaaaaaaaaaaaaaaaaaaaaaaaaaaaaaaaa

SEQ ID NO: 808 - DNA, 4118 bp, Homo sapiens
aaaagcagcatcagacaagagctttattaatcccttacacgagcaaatgcgatctctgacctactagacttgttttcctacaatttcacaaaaagcctcgctagaggaatgtgcaaggacagaagggaaactgaggagacccgcaactcattagcgaaataatagggtgcacttcaataaaaatgcggtcctgaagtggagcagactcaccggcaaggagcccggaaaatcgtcaggggcggcggcaaaatactatcaaatcagcctgggaagcatcttttcgctcagcaagttcaagagaacaaatatgttacaatccttgcctattcttgcctccacttcataatgtcataaaagccacctggggtgtcatttatcaacctctctccagcccactcttccaaaataacactacagtttcctacatgtgtatttttgccaggactccaaagagccttgctaaagtggaacaagcaaaatcctcccctggcctcctgggactgcagtcaccaggctgtcaaagcctcaataccccactgagttccagagaagggtctcaaagctgggagaggatcaaactaacatggagtagagaattgaactgtgaaaaagaagcccgagattccccagcgacgtggtgttgcagccccgttgaaggagtcaacttgcaggctgttaaagacctcaagtcattagcatcagctgctgcactaaaggggcaagtcagcgcctctaagtggcttagcgcacaaacgaggctcccgagacggcctcggcaactccatcccctcctccaccacccgctggatgtgaaaagctttccggagcccatcttgggggaagcttggtagtgttggcgctcctgaagagagacgacgcccgtttatcacccccaggcaactagctgcgcaaatcagcggtggctccagggctagagaatccctggagctaaccgcacccctctccctttcacggaacgcggactccggggaaatacgcacggggtccgcacgcgctgggtgtccagctctctgtcacagcttctccaagtgcctagtgaaacggggaaaggccctctccaatcattttggaagagcctaaaaggcggcaacaccaacacctcttgacatggaaatacactgatacaataggcaaaaggaaacactcgattgcatcttcccggttccaggtggccttatttgggagattctatactgaccttattcctgtgatggaggatactggcatccagcgaggcatctgggatggagatgccaaggctgtccaacaatgtctgacagatatttttaccagcgtttacaccacctgcgacatccctgagaatgctatatttggtccctgtgtcctgagccatacttccctatatgacagcatagctttcatagctctcaagtctactgacaagagaacagtaccgtatatctttcgggtagacacctcagcagcaaatggttcctcagaaggtctcatgtggctgcggttggtccaatcggccagagataaggaagagcagaaccttgaagcctacataaaaaacggacagctgttctaccgctctctccgcaggattgccaaagacgaggagttactagtttggtacgggaaagaactgactgagttactcttgctctgcccctctagatcccacaacaaaatgaatgggtcgtccccttacacatgcctggaatgcagccaacgtttccagtttgagttcccctatgtggcgcatctgcgtttccgctgccccaagagacttcacagcgctgatataagtccccaagacgaacaaggcggcggcgtgggcaccaaggaccacgggggcggcggcggcggtggcaaagaccagcagcagcagcagcaggaggcacctttaggcccgggtcccaagttttgcaaagccggccccctccaccactacccatccccctccccggaaagcagcaacccatccgctgccgccggcggcagcagcgcgaagccatccacagacttccacaacctggccagggagctggaaaactcccggggaggcagcagctgctccccagcccagagcctcagcagcggtagcggcagcggcggcggcggcggccaccaggaggcggagctgagtcccgacggcatcgccacgggcggcggcaaaggaaagaggaaattcccggaggaggcggcggagggcggcggtggcgctggtctggtagggggccggggccgcttcgtagagcggcccctcccggcctccaaggaggatctggtgtgcacaccgcagcagtaccgagcctcgggcagctacttcggcctggaagagaacggccgcctcttcgcgccgccaagtcccgagacgggcgaggcgaagcgcagcgccttcgtggaggtgaagaaggctgcccgcgcggccagcctgcaggaggaggggacagccgacggcgcgggagtcgcctccgaggaccaggacgctggcggcggcggcggctcctccacgcccgcggccgcgtcaccggtgggcgccgagaagctgctggccccgcggcctgggggcccgctgcccagccggctcgagggcggcagtcctgcgaggggcagcgccttcacttcggtgccgcagctgggcagcgcgggcagcaccagcggtgggggcggaacgggcgccggggccgcaggcggcgcgggcgggggccagggcgccgcgtcggacgagcgcaaaagcgccttctcgcagccagcacgctctttctcgcagctgtccccgctggtgctgggccagaagctgggcgcgctcgagccatgccaccccgccgacggcgtgggccccaccagactctatcccgccgccgcggaccctctagcggtgaagctccagggggccgcggacctgaacggaggttgcgggtccctgccgagcggcggcggcggcctgcctaagcagagccccttcctgtacgccaccgccttctggcccaagagctccgctgccgctgcagccgcggctgcggcggcggccgcggggcccttgcagctgcagctgccctcggcgctcacgctgctgccgccctccttcacctcgctgtgtctgcccgcgcagaactggtgcgccaagtgcaatgcctccttccgcatgacctccgacctggtgtaccatatgaggtcgcaccacaaaaaggagtatgcgatggagcccttggtgaagcggcggcgagaggagaaactcaagtgccccatctgcaatgagtccttcagggagcgccaccacctctccaggcacatgacctcgcataattgactcggaaaggaccccagctttccacgcgcgcgcaagcacagttaagccacctgcaggaataaacacgcgagaacatccaccgcttccttgcaccccgaaaccctgcacaaagacacatacattcaccgcccccccgcccccccaacgcgcacacacacgtcctctcctcccaggaacctcattcaaatatttacccgggacacacacccccccccacacacacacacagacacactcacacacaagagccaggatggtggagttttgattgggtgggttgtttgagggggttttcttttgaatgcacgcattttcactttccccaaaacaaaggtacattttttaaaatgtcatatattgcaacatattgatgcatttgtcatacgtttctacttaaattattaagcacttacgatttagatgtaataattatatgtaagggcaaaatttattttagatataaagtaaaggaggagggtgagatgctttctgcatttcttgatgacagtttgtgttcctacaaaaataaacaaaatgaataaaaagggatcaccattcaatttgagtttccagggggaagtgcatgtataatgaaatgataatggacttcaatgaagaatgtcatcaattatgtacatatgtattttcttttaatacaaagtgtaattttgtgccagtgaaatggagtctgaatagttatgtgtttcttttatccctggaaatatttattaaactttatagtttatccgagtatgttggatgctttgacaataaatgactattttcttcaaagcaaaaaaaaaaaaaaaaaaaaaaa

SEQ ID NO: 809 - DNA, 3088 bp, Homo sapiens
ccccttttccagaatcacttgcactgtcttgttcttgaatgagaaaggaagaaaagagcctcccattactcagacccgtgtaaacattattccccccaggagaaaatggtgttattcaaatgaatcataataaaatagcctctaaacagtttctaagcgggagcctccgtggaactcagcgctccgctcctcccagttcctaagaggtcccgggattcttgagctgtgcccagctgacgagcttttgaagatggcacaataaccgtccagtgatgcctgaccatgacagcacagccctcttaagccggcaaaccaagaggagaagagttgacattggagtgaaaaggacggtagggacagcatctgcattttttgctaaggcaagagcaacgttttttagtgccatgaatccccaaggttctgagcaggatgttgagtattcagtggtgcagcatgcagatggggaaaagtcaaatgtactccgcaagctgctgaagagggcgaactcgtatgaagatgccatgatgccttttccaggagcaaccataatttcccagctgttgaaaaataacatgaacaaaaatggtggcacggagcccagtttccaagccagcggtctctctagtacaggctccgaagtacatcaggaggatatatgcagcaactcttcaagagacagccccccagagtgtctttccccttttggcaggcctactatgagccagtttgatatggatcgcttatgtgatgagcacctgagagcaaagcgcgcccgggttgagaatataattcggggtatgagccattcccccagtgtggcattaaggggcaatgaaaatgaaagagagatggccccgcagtctgtgagtccccgagaaagttacagagaaaacaaacgcaagcaaaagcttccccagcagcagcaacagagtttccagcagctggtttcagcccgaaaagaacagaagcgagaggagcgccgacagctgaaacagcagctggaggacatgcagaaacagctgcgccagctgcaggaaaagttctaccaaatctatgacagcactgattcggaaaatgatgaagatggtaacctgtctgaagacagcatgcgctcggagatcctggatgccagggcccaggactctgtcggaaggtcagataatgagatgtgcgagctagacccaggacagtttattgaccgagctcgagccctgatcagagagcaggaaatggctgaaaacaagccgaagcgagaaggcaacaacaaagaaagagaccatgggccaaactccttacaaccggaaggcaaacatttggctgagaccttgaaacaggaactgaacactgccatgtcgcaagttgtggacactgtggtcaaagtcttttcggccaagccctcccgccaggttcctcaggtcttcccacctctccagatcccccaggccagatttgcagtcaatggggaaaaccacaatttccacaccgccaaccagcgcctgcagtgctttggcgacgtcatcattccgaaccccctggacacctttggcaatgtgcagatggccagttccactgaccagacagaagcactgcccctggttgtccgcaaaaactcctctgaccagtctgcctccggccctgccgctggcggccaccaccagcccctgcaccagtcgcctctctctgccaccacgggcttcaccacgtccaccttccgccaccccttcccccttcccttgatggcctatccatttcagagcccattaggtgctccctccggctccttctctggaaaagacagagcctctcctgaatccttagacttaactagggataccacgagtctgaggaccaagatgtcatctcaccacctgagccaccacccttgttcaccagcacacccgcccagcaccgccgaagggctctccttgtcgctcataaagtccgagtgcggcgatcttcaagatatgtctgaaatatcaccttattcgggaagtgcaatgcaggaaggattgtcacccaatcacttgaaaaaagcaaagctcatgtttttttatacccgttatcccagctccaatatgctgaagacctacttctccgacgtaaagttcaacagatgcattacctctcagctcatcaagtggtttagcaatttccgtgagttttactacattcagatggagaagtacgcacgtcaagccatcaacgatggggtcaccagtactgaagagctgtctataaccagagactgtgagctgtacagggctctgaacatgcactacaataaagcaaatgactttgaggttccagagagattcctggaagttgctcagatcacattacgggagtttttcaatgccattatcgcaggcaaagatgttgatccttcctggaagaaggccatatacaaggtcatctgcaagctggatagtgaagtccctgagattttcaaatccccgaactgcctacaagagctgcttcatgagtagaaatttcaacaactctttttgaatgtatgaagagtagcagtcccctttggatgtccaagttatatgtgtctagattttgatttcatatatatgtgtatgggaggcatggatatgttatgaaatcagctggtaattcctcctcatcacgtttctctcattttcttttgttttccattgcaaggggatggttgttttctttctgcctttagtttgcttttgcccaaggcccttaacatttggacacttaaaatagggttaattttcagggaaaaagaatgttggcgtgtgtaaagtctctattagcaatgaagggaatttgttaacgatgcatccacttgattgatgacttattgcaaatggcggttggctgaggaaaacccatgacacagcacaactctacagacagtgatgtgtctcttgtttctactgctaagaaggtctgaaaatttaatgaaaccacttcatacatttaagtattttgtttggtttgaactcaatcagtagcttttccttacatgtttaaaaataattccaatgacagatgagcagctcacttttccaaagtaccccaaaaggccaaattaaaaaaaaaaaaaaaaaaa

SEQ ID NO: 810 - DNA, 1327 bp, Homo sapiens
cgcagcgcgtgcaccagcggctccggagcgagcggccgtggctgagaaggggagggcggaaagtttgtttccccgacgtcagcgccgggcgggccgcgaggctaggaggcggcgggagctgggcagagcgcggggcggccggggctctcgctccgacccgcgcccgcgacccttcctgggacccgagcccgagacccccgccggcccccccggggccgctcgcgggcatggacagcgcggccgccgccttcgccctggacaagccggcgctgggcccggggccgccgccgcctccacccgcgctggggcccggcgactgcgcccaggcgcgcaagaacttctcggtgagccacctcctggacctggaagaggtggcggcggccgggcggctggcggcgcgccccggggccagggccgaggcgcgggagggcgcagcacgggagccgtccgggggcagcagcggcagcgaggcggcgccgcaggatggtgagtgtcccagcccggggcgcggtagcgccgccaagcggaagaagaagcagcggcggaaccgcaccacgttcaacagcagccaactgcaggcgctggagcgcgtgttcgagcgcacgcactaccccgacgcctttgtgcgcgaggagcttgcccggcgcgtcaacctcagcgaggcgcgcgttcaggtctggtttcagaaccgccgcgccaagttccgcaggaatgaaagggccatgctggccagccgctctgcctcgctgctcaagtcctacagccaggaggccgccatcgagcagcccgtggctccccggcccaccgccctgagtccagattatctctcctggacagcctcgtccccctacagcacagtgccaccctacagccctgggagctcaggccccgcaaccccaggggtcaacatggccaacagcatcgccagcctccgtctcaaggccaaggagttcagcctgcaccacagccaggtgcctacggtgaactgaagtccagtcccaccaggacccagacgcctccctgggtggacagcaatagaaaagggggcagacgcccaggaagtgaccttctcctggatgagctctcctggcccgtctgtccagcctggactcccgagcccacgaggctgttgaggcccctgcagccgggcccagctcttctgtccttggccaccagagactgcagcccacaacccttggaggggttgggccggaaggtggaagagcctgccaaggacctcatttagtttgtgtattaaaaccaaaaagcttttgtctttaagaaataaaaccatttttttaagccccaaaaaaaaaaaaaaaaaaaa

SEQ ID NO: 811 - DNA, 1690 bp, Homo sapiens
cgggcccggtagctgggcccgcgtccgccgcccgcatccccgcgccgccgcatctcctcgccgcctcccgggcttcggacccccggtctcgcccccgaaacatgactcgcgatttcaaacctggagacctcatcttcgccaagatgaaaggttatccccattggccagctcgagtagacgaagttcctgatggagctgtaaagccacccacaaacaaactacccattttcttttttggaactcatgagactgcttttttaggaccaaaggatatatttccttactcagaaaataaggaaaagtatggcaaaccaaataaaagaaaaggttttaatgaaggtttatgggagatagataacaatccaaaagtgaaattttcaagtcaacaggcagcaactaaacaatcaaatgcatcatctgatgttgaagttgaagaaaaggaaactagtgtttcaaaggaagataccgaccatgaagaaaaagccagcaatgaggatgtgactaaagcagttgacataactactccaaaagctgccagaagggggagaaagagaaaggcagaaaaacaagtagaaactgaggaggcaggagtagtgacaacagcaacagcatctgttaatctaaaagtgagtcctaaaagaggacgacctgcagctacagaagtcaagattccaaaaccaagaggcagacccaaaatggtaaaacagccctgtccttcagagagtgacatcattactgaagaggacaaaagtaagaaaaaggggcaagaggaaaaacaacctaaaaagcagcctaagaaggatgaagagggccagaaggaagaagataagccaagaaaagagccggataaaaaagaggggaagaaagaagttgaatcaaaaaggaaaaatttagctaaaacaggggttacttcaacctccgattctgaagaagaaggagatgatcaagaaggtgaaaagaagagaaaaggtgggaggaactttcagactgctcacagaaggaatatgctgaaaggccaacatgagaaagaagcagcagatcgaaaacgcaagcaagaggaacaaatggaaactgagcaccaaacaacatgtaatctacagtaataaaaaatatatctcattttgggctcaaagcattaatccagttactgaaaagagaatacaagtggagcaaacaagagatgaagatcttgatacagactcattggactgaatttcccccttccccccattgatggaagaatgttccagattctaaattgaggacttcattattaatggcattactgtgttatgattaacaaatttcctgtaaggtacacactacatactaaggtcggccatcattcctgttttttttttttttttttttttttaaccaagcttaaaatgaagctttgtgtttgaaagtaataacaagctcagacgaagatggtggttgtacattattcatctagaaaatataaaaattcattttgttttgaagctagttattaaactggaatagcagttatatccctgagaatggggcccttctcttgacattcctttgttgtttaattctttagaatcttaataaatgtttttttaatcctgagagattaaacagtagtagacttgttaagaatgaaactgtaaccaaaattttaaaataaagttttttttaaaaaaaaaaaaaaaaaaaaaaaaaa

SEQ ID NO: 812 - DNA, 1545 bp, Homo sapiens
gaagacaccaccggaagcaaggaaggtgctgtgtaatcattaaggagcggaggcttttggagctgctaaaatgccggattacctcggtgccgatcagcggaagaccaaagaggatgagaaggacgacaagcccatccgagctctggatgagggggatattgccttgttgaaaacttatggtcagagcacttactctaggcagatcaagcaagttgaagatgacattcagcaacttctcaagaaaattaatgagctcactggtattaaagaatctgacactggcctggccccaccagcactctgggatttggctgcagataagcagacactccagagtgaacagcctttacaggttgccaggtgtacaaagataatcaatgctgattcggaggacccaaaatacattatcaacgtaaagcagtttgccaagtttgtggtggaccttagtgatcaggtggcacctactgacattgaagaagggatgagagtgggcgtggatagaaataaatatcaaattcacattccattgcctcctaagattgacccaacagttaccatgatgcaggtggaagagaaacctgatgtcacatacagtgatgttggtggctgtaaggaacagattgagaaactgcgagaagtagttgaaaccccattacttcatccagagaggtttgtgaaccttggcattgagcctcccaagggcgtgctgctctttggtccacccggtacaggcaagacactctgtgcgcgggcagttgctaatcggactgatgcgtgcttcattcgagttattggatctgagcttgtacagaaatacgtcggtgagggggctcgaatggttcgtgaactctttgaaatggccagaacaaaaaaagcctgccttatcttctttgatgaaattgatgctattggaggggctcgttttgatgatggtgctggaggtgacaatgaagtgcagagaacaatgttggaactgatcaatcagcttgatggttttgatcctcgaggcaatattaaagtgctgatggccactaacagacctgatactttggatccagcactgatgaggccagggagattggatagaaaaattgaatttagcttgcccgatctagagggtcggacccacatatttaagattcacgctcgttcaatgagtgttgaaagagatatcagatttgaactgttagcacgactgtgtccaaatagcactggtgctgagattagaagcgtctgcacagaggctggtatgtttgccatcagagcacggcgaaaaattgctaccgagaaggatttcttggaagctgtaaataaggtcattaagtcttatgccaaattcagtgctactcctcgttacatgacatacaactgaaccctgaaggctttcaagtgaaaactttaaattggaatcctaaccttatatagacttgttaataaccaattcataaacaaataaatggcttcaaaattgtatgcttttttccatatctcttcttgtaatataataaaaggtgatttctaatgttaaaaaaaaaaaaaaaaaaa

SEQ ID NO: 813 - DNA, 1332 bp, Homo sapiens
aagacggctcggatgccggcggtctctgctgaagagagaagatggcgcttgacggaccagagcagatggagctggaggaggggaaggcaggcagcggactccgccaatattatctgtccaagattgaagaactccagctgattgtgaatgataagagccaaaacctccggaggctgcaggcacagaggaacgaactaaatgctaaagttcgcctattgcgggaggagctacagctgctgcaggagcagggctcctatgtgggggaagtagtccgggccatggataagaagaaagtgttggtcaaggtacatcctgaaggtaaatttgttgtagacgtggacaaaaacattgacatcaatgatgtgacacccaattgccgggtggctctaaggaatgacagctacactctgcacaagatcctgcccaacaaggtagacccattagtgtcactgatgatggtggagaaagtaccagattcaacttatgagatgattggtggactggacaaacagatcaaggagatcaaagaagtgatcgagctgcctgttaagcatcctgagctcttcgaagcactgggcattgctcagcccaagggagtgctgctgtatggacctccaggcactgggaagacactgttggcccgggctgtggctcatcatacggactgtacctttattcgtgtctctggctctgaactggtacagaaattcataggggaaggggcaagaatggtgagggagctgtttgtcatggcacgggaacatgctccatctatcatcttcatggacgaaatcgactccatcggctcctcgcggctggaggggggttctggaggggacagtgaagtgcagcgcacgatgctggagttgctcaaccagctcgacggctttgaggccaccaagaacatcaaggttatcatggctactaataggattgatatcctggactcggcactgcttcgcccagggcgcattgacagaaaaattgaattcccaccccccaatgaggaggcccggctggacattttgaagattcattctcggaagatgaacctgacccgggggatcaacctgagaaaaattgctgagctcatgccaggagcatcaggggctgaagtgaagggcgtgtgcacagaagctggcatgtatgccctgcgagaacggcgagtccatgtcactcaggaggactttgagatggcagtagccaaggtcatgcagaaggacagtgagaaaaacatgtccatcaagaaattatggaagtgagtggacagcctttgtgtgtatctctccaataaagctctgtgggccaagtcctctaggaaaaaaaaaaaaa

SEQ ID NO: 814 - DNA, 1339 bp, Homo sapiens
atggacgcggtgttgctggagcacttccccgggggcctagacgcctttccttcttcgtacttcgacgaggacgacttcttcaccgaccagtcttcacgggaccccctggaggacggcgatgagctgctggcggacgagcaggccgaggtggagttccttagccaccagctccacgagtactgctaccgcgacggggcgtgcctgctgctgcagcccgcgcccccggccgccccgctagcgctcgccccgccgtcctcggggggcctcggtgagccagacgacggcggcggcggcggctactgctgcgagacgggggcgcccccaggcggcttcccctactcgcccggctcgccgccctcgtgcctggcctacccgtgcgccggggcggcagtactgtctcccggggcgcggctgcgcggcctgagcggagcggcggctgcggcggcgcggcgccggcggcgggtgcgctccgaggcggagctgcagcagctgcggcaggcggccaacgtgcgcgagcggcggcgcatgcagtccatcaacgacgccttcgaggggctgcgctcgcacatccccacgctgccctacgagaagcgcctctccaaggtggacacgctgcgcctggccatcggctacatcaacttcctcagcgagctcgtgcaggccgacctgcccttgcgcggcggtggcgcgggcggctgcggggggccgggcggcggcgggcgcctgggcggggacagcccgggcagccaggcccagaaggtcatcatctgccatcggggcacccggtccccctcccccagcgaccctgattatggcctccctcccctagcaggacactctctctcatggactgatgaaaaacaactcaaggaacaaaatattatccgaacagccaaagtctggaccccagaggaccccagaaaactcaacagcaaatcttccttcaacaacatagaaaacgaaccaccatttgagtttgtgtcctgagaagtcccagactcggctgaagatctgattatgtctctgtgcatattgtacatgtaaatatctataatgtaaatgtaatttaagaatcaaatttttcgaatggcaatcaactgtttattatttatctatttattatcctgttgagttgatgaaatagatgatttctttttaaatatataatttatataacttatcctgattttctgaaaatatgcaatagcctatgattttcctgaactctgtgttgttgggagaactctggccagaaaacgtcctgcttatttattgccagatatggtttatttctaagcgttgtcaataaatgctatttacaccttttcctgaaaaaaaa

SEQ ID NO: 815 - DNA, 2737 bp, Homo sapiens
ctgaacctcagccgcgccgggaggcgagcccgttggcgaggggcggggcagatggcgagggagcggggcgagctgctttttgaggctgcgcactcgcatggccccacctcgcaggtccacttccggcgccgcggctgttccgggcggagaccgcttgtgctggagtcggagttgtaacgctccactgactgatagagcgaccggccgaccatggcgcccggagtggcccgcgggccgacgccgtactggaggttgcgcctcggtggcgccgcgctgctcctgctgctcatcccggtggccgccgcgcaggagcctcccggagctgcttgttctcagaacacaaacaaaacctgtgaagagtgcctgaagaacgtctcctgtctttggtgcaacactaacaaggcttgtctggactacccagttacaagcgtcttgccaccggcttccctttgtaaattgagctctgcacgctggggagtttgttgggtgaactttgaggcgctgatcatcaccatgtcggtagtcgggggaaccctcctcctgggcattgccatctgctgctgctgctgctgcaggaggaagaggagccggaagccggacaggagtgaggagaaggccatgcgtgagcgggaggagaggcggatacggcaggaggaacggagagcagagatgaagacaagacatgatgaaatcagaaaaaaatatggcctgtttaaagaagaaaacccgtatgctagatttgaaaacaactaaagcgctccagcacatcagtcccgacgcttcctgtgaggtgcacgctccgcagcccagcccagccgggagaccacgtggccattgcggtctcctgaccttggccagtgaacctgccagccttccaggacaggcggccggagagctgcccctgaaggacagtcctctcgtcttgcagactggtgaccttctattccctgttcatctctgtttctagatttagtcacttgaaataagaaatctttggggtttgggcttttttatactcttctcagtttgtgaaacgctaactgcacacgaagccgcctgacggcacccagcgctgtggctgtcattctcccagggcagaaccctgcgtttctctctgtccactaacaagcttcacacgcaacacagggaagtcggtttgacttttgtcatgaggagaactgaccagccctcatcattccccataaaaccacggacagcgtctgtgtgcgcatcttgagtcttcacacctgttgactcacacggcttttgctgatgacacggggctccagtacacagtctgataaggacttaacgtcctaacctcaattgtattaaatagcattggggaatagctaaacctttttaaaaaaatttattggattttcctccctgcttaaaagatttcaccagaaaaccttcatataaaaattcaggccctttttggacaatttttaaaatttgtatctttactagaacatgagaatctttttcccttggaagcttgaattataaatgtggtgtttggcctgcctcagcagcaccagttgactgctcgtgtgccagcggtgtggggaggacggggcaggacgctgcagctctctccagccctgttggcatcctcagtgcctgcaggcctctcgctgcctgttgggctgtctggggggtggccatttagggatcgtggggacggggtccaccccaagaagaaagaaaggcccgtccacaggcccggctctgggccacgtgccccggaagcaggtgtgtccagagtcagctgagggctctccccacaccacccagcaggcgctggtgctccttctgcctcatgggaccagtccagcttccagccgctctggctcgagggtggtctgagcacttccttctgagtgggcttctctgggagctctccagtggcactgctggacctgcccacgtttctgtaaaatcaggatacgtggctttagtaagcagaccaagcgcttcgtggcagggaaagcagcgtgcggggaagtcactgaaaagtgctgcctaaggaagtttggaaatagtccccgttccagattgccttgaattttaaaacattttgctttgggaaagtaggtcagcagcacctaagatcaaggatgcgttccattttcacacttcacagtcatgaaaactgagaagactgtcttcagcgtgaactaaagttcacaggcagatcactgatccagaacacttcaagaactcgtcaaacagctcgataagcctttttgactgtgtacatctgtaccgggaataacattcctaggctgaaatttccacaaagaatagaacctgtacccagttcttcaggctgatttccctgacctcttgggcatttgtatttgtagtaaagtattgcagagattcctaagtattttatagcagccatcaaaattggactttgtattgtttattcataaaagacacttggtaatagacttcagtgaactctgtatgaatgcagtagtgtgcgtgcaaaatccgcttcctgagcgtagggtgctgagctggcgctagggctcggttgtgaaatacagcgtagtcagcccttgcgctcagtgtagaaacccacgtctgtaaggtcggtcttcgtccatctgcttttttctgaaatacactaagagcagccacaaaactgtaacctcaaggaaaccataaagcttggagtgccttaatttttaaccagtttccaataaaacggtttactacctga

SEQ ID NO: 816 - DNA, 2614 bp, Homo sapiens
cgactgaggcggcgggcggagcggcaggcggcggcggcgcggcagcggagcgcagcatcatggcggaccgagacagcggcagcgagcagggtggtgcggcgctgggttcgggcggctccctggggcaccccggctcgggctcaggctccggcgggggcggtggtggcggcgggggcggcggcggcagtggcggcggcggcggcggggccccaggggggctgcagcacgagacgcaggagctggcctccaagcgggtggacatccagaacaagcgcttctacctggacgtgaagcagaacgccaagggccgcttcctgaagatcgccgaggtgggcgcgggcggcaacaagagccgccttactctctccatgtcagtggccgtggagttccgcgactacctgggcgacttcatcgagcactacgcgcagctgggccccagccagccgccggacctggcccaggcgcaggacgagccgcgccgggcgctcaaaagcgagttcctggtgcgcgagaaccgcaagtactacatggatctcaaggagaaccagcgcggccgcttcctgcgcatccgccagacggtcaaccgggggcctggcctgggctccacgcagggccagaccattgcgctgcccgcgcaggggctcatcgagttccgtgacgctctggccaagctcatcgacgactacggagtggaggaggagccggccgagctgcccgagggcacctccttgactgtggacaacaagcgcttcttcttcgatgtgggctccaacaagtacggcgtgtttatgcgagtgagcgaggtgaagcccacctatcgcaactccatcaccgtgccctacaaggtgtgggccaagttcggacacaccttctgcaagtactcggaggagatgaagaagattcaagagaagcagagggagaagcgggctgcctgtgagcagcttcaccagcagcaacagcagcagcaggaggagaccgccgctgccaccctgctactgcagggtgaggaagaaggggaagaagattgatcaaactgaatgaaacccccacacacacacacatgcatacacacacacacacagccacacacacagaaaatatactgtaaagaaagagagaaaataaaaagttaaaaagttaaaaaaaaaaaaaaacctgttaactccaagggagcaccacccacagaacctccaccaactgacagtttctcttcttgacttgccacccatcgctggatgttgtccactttatccaccatataaaacagtaagcagctgctaaaaacaaaaaaaatacaaaaagtaataacattatatgaactgtgtttcctacttgattaaaaaatataaagaactgagtgtttatttccctaattaaccaagaacttttgtacacgtttaagctattattattaaaaagtgtttgcaaaatggtcaagattataatattgctgaattatataaaagtccttttcatgttgagctaacatttgactttagcacaaaaaagagatattttagaacacgtaaaataatatttttagtttttctcattttgttaccaaatttcaaaccttacatggaggttattatagtatatttgacaccctatatacctgtgattagagatgtgtatatatatgagggctaggcatgctgtgtgtctgagctttgtctaaatgttatgcagaagtttgtagagttaaaggtacgtaggtttaattcatgcaaggtaaacaataagtgctctcttttatacaatatgcattgcatctggaccttaaacttataaaaatggtcagtgaaacttctgtgaacatgaagaaattattaaaaaaggcatttaaatgaaatttgctaagttgtgatttttatggttggaaccaaagttattcaaatagtaaaaggaaaaagaaagaaaaaggagatctcccataatatttttctgcatctgtttgctttgactgagtaggcgttttgtcattattgtgtatatgagatgtacttgtatcgttcataatatattttttttattatgtgtagaaagattttaaaaaactaacgtgcagcaatttccagtgaacctgtacttggacatcaggtagtgagtctatttgtggtcactagcactgtctcctaaacttgtaagaggtctgaagctattctttgatttttgctagtgctattaacttatgtagacctgttaaaaagcagagcaacacaattatagttatcctactgagccatggattctgagttttgttttaaaagtgaaagccaagttggtgtatgtaaaggatttccatgtagctgtggtgctagttattactggctacattatatgctaagtgtatttgtgttccccaagtgtacaagccttctatcaaaagtatgttctataactcatatattcaaggtgtagggtatgaaaatgcaaagtttaggagagcactttaccaagctggtgtcctccaaactgaaattgtttgtaacgatagtcttttacaggttttcctttaaagatgtttgtgtgcttttaattgacaactaacttcttgctgctgtatagtaaaatattaatatatttttatcattaaactgctgcatgactatca

SEQ ID NO: 817 - DNA, 153875 bp, Homo sapiens
gatctgcccgcctcagcctcccaaagtgctgggattacaggcgtgagccaccatgcccggccaacaattttataaataagaataaatttgaaaacctttatgacttcaagacttatgaatgtacggtaattgagagagtaaagtattagctaaaggacagacatagagatgaacagaagagaatagagaacccggaaatacactcacacaacactctattgtcaatctcttttcaacaaagttgcaaaagtagtaaaacaacttcagaaaacagtgtagcagctttaaaggtagcataaacttaccatatagcttaggaatcttacctatagggatatccccaagagaacaaaaacatgtgtcctagaaatacttacacttgcatgctcagcagttttatttataaaagccaaacactagaagctgtttttcacacacacacacacacatacacacatacacacactcaaaactaaaatgtccatgaacagaagaaggaataatcaattatggtatatccttaaaataccattcaacaacataaaaaataaactatgaatacaagcaaaaacagcatagataaaaaaaagccctgagctgagtggaagaagccagacacaaaagttgacatacagtatgattccatttatatgaaatgaagaagctgcaaaactagagtaaaagaatgcagatcactggttattgggcctgtggtctgagggtgaaggttctgactgaaagagtacaggaaaatgttatcaggcaatggtaattttctctatcatgactgtgttggtggtttcatgacagtacagctgacccttaaataacacaggtttgaaatgtacaggtccaattatatgtgaattttatttcaataaatatattggaaagttttttgaatatttgagacaatttccaaaaaccagaattcattgaaataagtatgtcaagaatgcataatacaaaatatatgtaggtactattttatcatttactaccataaaatatacataaatctattatacaaggttaaaattagtcaagagtcacataaacacagactgtacttggtgcttccagagaaatgtaaacaaacacaagatgcagtattttttttttttttttttttttgagatggagtctctctctgtcaccaggctggagtgcagtggcatgatcttggctcaccgcaacctctgcctcccaagttcaagtgattctcctgtctcagtctcctgagtagctggaactacaggtgtgcaccaccacgctgagctaatttttgtattttttagtagagacagggtttcaccacgttggtctgtgttggaggtcaaaagaattagggtcatgaccaactcagtatgccactggagactatatgagcaaacaacaaactagtctcatgaatgcagtatgttggcaagcctacaactgtgtctgcagccagatggaatgctaagggcagtcacaccccaggtgcagtgttccttgtggttatctacaggaacatctggagtctgttgtataaagaaagcaattatgtgagcctgtgataaatcaagcagctgaccaactgttacgtcttcctctctgtggattctacctaataaatacaaagggctgtagaagctcagggcccttgttccctagaagcaaggagccctctgaccccttctttaaaacagatctttttgtcttcatttctgcatttgtccttcttcattcagtcccgaaccgacagccacaagtggcgcccgaacagggacgtgagtgaagaaggtctgctggagcagagaaagtgaaactgaccagaagaatgagaaaccccaggacaagtctgctggcagtggatataaggtcagtgccctaaagaggtactgggagtgggaagtttctgaatcagggtaacatagggcagaatttgtctgctgaagagcaacattatatgcagtcacttaaaggtttacttaaacaatctggtgctcaggttagttctcaaacactagctaagctgctgcaggaggttatcacgcataacccatggtttccacagacagacactcttgatgtggaaaactggggtgaagatttgcttacggcataggatatgagacttacaaattaaactattggcaatccaggatttaaaatgttaaagaaaatgagatatcagagcagacaaggcttaggaaagtccctacaggaaaaccctgatcctatatcaataactgggcaaacagatagaaaagggctaggtcgtcagatttctgatgtgggtcattgatatttctcctccacccactgctttgccactagagtggctaacaaacctgtatgggtggatcaatggcccctttcacaggagaaactaactcaactccatcagctagtaaaagagcgattggatgcaggacatattgaagagtcagcccctggaattcaccagtatttgtaataccaaaaaagtcaggaaaatggggactgctacatgatttgagagctattaatgcacagattaaaccaatgggtgcattacagcaaggtctgccatccctggcaggcatttccaagagactggcctcttgtagtaatagatcttattgttttttttactatactattacatcagcaggataggcctggatatgccttctctgtgccttctgttaatcaaagggagcctgtctcttgttatcaatggaaagttttgccccaaggcgtgcttaacagtcctacattatatcagaattttgtaggacaggcattaaaggagccttgtaatgtgtttcccactggctatgtcattcattatatggatgatattcttttggccgctcctacagatcaaatcttacatcagttattcagagaaacaaaacaggctttgactaaatggaatctcaaaatagctcctgaaaaggtgcaaaccacctccccataccagtacttaggcactattattactgaaagaagtgttcagcctcagaaagtagtcatctgtagggacagattacaaactttgaatgatttccaacaattatcaggggacattaattggctgcacccaatgctaggtattgctacttattaactcaaacacctttatcagaccctccaaggagattcttcattagactctcctcggcaacttactaaggaggcagaagctgaattatagcttgtagaacagatgcttcagcaacaacatgccacctggttacagccacaaaagcctttgcttctgtttattcttcctacctcccattctccaacaggacttttaggccaattcatacacaaatctgtaatagtattagaatggcttttttatccaatcagacagtgaaatctttgcaaatttatctttctttaattactcaacttataacaataggtaggcatagatcaaaaatgtttatgggatgtgatccagacaaaattattgttcccttggattcccaacaacaggccacagcatgggaaatgtcgactgcatggcaaatcactctcacagattttgtaggaataatagataaccattatccatcagacaaaattttgcaattttatgaagttcacccttttacccttcctgtaatcactcatcacaagcctattccaggcagacagacctattttactgatgactcttctaaaggctgtgcagctatttatggacctaagcatactgaaacaataaagacctctggagtttcagctcaatgctcagaattagtggcagttattcaagttttacagctcaccgctttatctcctattaacattgtctgtgattcagcctatattgtaaatgtagccagtcacattgagactgccactattaaaagcaccctagaaccagagctgtataatttgtttctaagacttcaacaagctgttcactctcatgctgctccttttcatatttctcatatttgctatcacacacaacttcctggaccactatctctaggtaacaataaagcagataaactaatcggttctgtatttcaacaagcccaatcttctcatgcattcctgcatcaaaacacctctgcccttactcgtatgtttcatctgccttgcagccaggcttgagctattgcgcaagcctaccccacttgccagcctgtccctggcgttgcacccatggaaggatgtaacccactaggcttggctccatatgaaatctggcagatggatgttacacatatagcagcctttggcaaactcagctatgttcatgtgactacagacacttactcccatatgctacatgtcacgtgccaaactggggaaacagctggtcatgtctgatgacattgtctgtcaccttttgcccatatgggggtccctacacaatgaaaaactgacaatggacctgcttatgttagtcatgcttttcaaaattttttacagttatgggcaatcactcataaaacagaaattccttacaatcctcaaggacaaggaatcatagagtgggcacatcaaacattacaatgcatgttgaaaaaacaaaaatggggactaggagaccagctaccacctcaaacaaaattacatttagccttatttactttaaattttttgactcctggtatggatattaagactctggcagaatgacattggcaaatgttagagggaaaaaggaaagtttacccaaaggtattacagaaatccccggaagaaggacaatggaaaggcccggtagacttactgatatggggacgagggtttgcttgtgtttttacaggagatggacaatccgtgtgggtgccctcaaggtgtgtgtgaccatggaacgggagactggagaaatccatggatctcaactgtgggcccagctcctccagtacgagccatgagctagttgaatctgaatgcaaagacagaacaaggaccgactggagtcacactgacatcaacccccataaaatggggacagctcaagaaaaccacacaggaagctgagaaactgctggagcaaaacccctgactccatgtttatggccatgctagctgtaatatcctgtgcggtatgttttccctgtgcagaggcaaaaacttattgggcatatattcctaacccaccagtagtacgaccggtactcgggagcaacactcctcctgagatatatcatgatcagggagcatggacaccaggacccctaactccccctgacagagagtgattagattctcagaacaatggtatcaattatactgcaccattggagggacttctttatgtgtcacccaggatgcatcactcaaccgcagttgccttgcaattcagtcccaagcatgcttgagttaccatggaaaaattatgtacctattaggccttagctctattaatattactggtgtagttactaatcactcctggccccatcacccaaattgtattgattgtacagaatgggctccctttgataattctcacccctgtccttggactcagtgtcttggccccttagctaaacaacagtccatgttaatgggagacattatcgactggggtccccatggtcatttagatgggagaagtgagaatcagacctcatggcataaattttgctggcactggtggcgaaacttgaacatctcttcgctacatcccaatctgctacacaacttgcttggcacagaatgggctttagcccacctttgcctcaatggcattatcaaggaaagagaggtccaattcaggagtcaatatggaagacagcactcccatttatgaatggcagcatttgggttgggacactatccaataatagtaataatgctcaatgcagttttaatgttacctttgtagaaaatactaccacacagtttacaatttgtatttttaatccgtatgtttttctagcagcaaaaaaggaccaactccgggtaaacaatgcccaatcgatttgtgatgcctgtcaactgtatcattgccttaatcatagcacaatacaaacacacagcatatccaccctaataattctaggtcacattcctggattatagattcctgtaaatctgtccgagccttgggaggccacccccgctttacattttgtaaaactccttcttattcagcttactcatcgtgctcgtagagctttaggcatgataatttttgctataatttccctagtcacactaataacctctgctgtgttgtcctcagtagcactgcacagctccattcaaacagctcaatgtgtgaaaaattggatgtgcacagccgaccaggaatggatgcttcaaaataaaattaacaccaagatacaaacagaagtggcaatgttaaagactactgttctgtggctaggataacaaatacaaagcctgaagttgcagcagcaattgcattgtcattttaaccctattcatatttgtgtaactaatttggaatataatcaaagtgaatatccaaggaactttgtaaaggcccatttacagggagttttacattcaatgttacttttgatattaatgattcacaaagtaaaatccttaacttgaataagcagactcaagtgcttcagccctctttaaaagcttgggcagaattccagcaaggtttagggagccttaacccttggacctacttcaaacagcacctcaatgtcttttttgtgattatcggaataatgttattatgtttctgttttttgttcatagtctgtaaaatcagctggaccaccaaccggcaattgagagctgcacagcctgcaattacctttattcaattaatacaaaaacagaaaaggggggaggttggaggccgaaagaatgagggtcgtgaccaactcagtataccactggaggctatatgagcaaacagcaaactgttctcatgaatgcaggatgctggcaagctgacaactgcatctgccaccagaaggaatgctgagggcagtcataccccacgtgcagtgttccttgtggttatctataggaacatctggaggctgttgtataaagaaagcaattatgtgagcctgtgataaatcaagcagctgaccaaccattacctcttcctccctgttgattctacctaataaatacaaagggctgtagaagctcagggcccttgttccctagaagaaaggagccgcctgtctccttctttaaaacagatctttttgtctttgtcttcatttctgcatttgttctcttttgttcagtcccaaaccgacagccataggccaggatggtcttgatcttttgacctcatgatctgcccacctcggcctcccaaagtgctgggagccaccacacccagccaaagatgcagtattaagtcataatcgtgcatgtgtgtatgtgtgtgtttgaatagacagagtctccctctgtcgcccaggctggagggcagtgacatgatcatagattgctgcatactcaaactcctgggctcaagtgatccttctgcgtcggcctccccagcagctgagaccacaagcacatgccaccacactggctaattttaaaatgttttctgtacaggctgggcatggtggctcacacctgtaatcccagcattttgggatggttggcaggtcccagaagtttgagaccagcctgggaaatatagtaagaccccatctctacaaaaaaacaaagacaaattagctgggtatggtgccacgcacttgtggttccagctactcggggagctgaagtaggagtatcacctgagcccaggaggttgaggctgcagtgagctgtgattgtgccactgcactccagcctgggtaacagagtaagaccctgtctcaacaattttctgtagaggcaggggtctcgctatgttgcccaggctactctccaactcctggcctcaagcaatcttcccaccttgagctcccaaagtgctgggattacaggcataagccatcatgctgggctgataaaattaactacaggacatactacagtaccataataattttgtagacatctcctgttgttcacagtgttgtgagtattcacttaaagaaccccatgatgttaatcatctccacatgagcagttcatctctccagtaaatcacatattgcagtaaaaagtgatctctcaaggttctaatatattattcatagtgtttagtgcgatattgtaaactttaagtaacgctatatggcctatatgaagtgccagtagtgatgctggaagtgctcccaagaagcagggaaaagtcatgacattataagaagcagctgaactgcttgatatgtactatagattgaggtttgcagctgtagttgcccaccatttcaagataaattaatccagtatgaggatcattgttaaaaacaaacaaaaaaggaaataaagacattgctgcagctatgccagcaggcacaaaaatcttgcattttctgcaaaatatatcttttatctcatttaaaaatgcagctttcatgtgggtgcagaattgccatgggtaaggcatacagagagactcaaatacgatttgagaaacagtcattatatgacaactcaaagcattaggaaggtgaaggatctaaagctggagaatttaatggcagcaagggaaagtttgataattttagaaagatgtttggctttgaaaatgtcaagataataggagaagcaacttctgctgactacaaggcagccaacaatgtcccaggtgccattaagagaaccactgacaagaaattatatcaacctgaacagatttgttttttgttttgttttgtttttgagacagagttttgctcttgttgcccaggctggagtgcaatggcacgatctcagctcactgcaatctccacctcccaggttcaagcgattctcctgcctcagcctcccaaagtagctgggattacaggcacccgccaccatgcccagctaatttttttgtttttttttagtagagatggccatcttggccagggtggtcttgaactcctgacctcaggtgatccacccgcctcagcctctcaaagtgctgggattacaggcatgagccactgcacccggcctgaacaggcttttaatgcaaataaagtgccctgttttgggaaaaactgccacaaaggacatttattagtaagtaagagaagaacataccaagatttaaaacagaaagggataggctaactccagtgttttgttcaaatgtagttggttttatgataaggactgcccttatctataaaactgctaaccccaaacccttgcacaagctgtcagtcttttggttgtacaacaagaaggcctggacaatgagaaccattttttctgggttgttcccattaatgctttgttcctgaagtcaggaagtgccttgacagaaagtaattgcctttaaagttcttttgacattgtacaatgcccctggccagccagaaccccatgagatcaacaccaaagttgtggaagtggtctacttgatcctaaacaccctctaatttggcataaagatgatggagtcataagaatctttaaattaggatccctaatccccacattgttcaagggtcaactgtatatattgaccagtattcattgaactgtacattttaaactggcaaattttattgtgtgtaaattacacttcattaaatctgcttaaagagaaaaaaataatccatgagtccacagacataaatgaatgaatgaatgaagtaggaaagaaaaagttatactttatagtaaaatgtcagttaaaatagatggagatagaaaatcatcaatgagagctaaactggtgaagtaaaagattaatgaggaaaaggagttttatatatttctaaagaatctttcttctggccgggtgcggtggctcacgcctgtaatcccagcactttgggaggccgaggtgagcggatcacgaggtcaggagatggagaccatcctggctaacacggtgaaaccccgtctctactaaaaatacaaaaaattatctgggcgtggtgatgggcgcctgtagtcccagctactcgggaggctgaggcaggagaatggcgtgaacccgggaggcggaacttgcagtgagccgagatcgtgccactgcactccagccagcctgggcgagagagagagactccgtctcaaaaaaaaaaaaattttcttctatttatttgcatttatatagaaaaaacagtagagagaatgtaaacaacccagtcaggaggagactccaacactgaaaaaaattcatgagtaccatatttacatgttttaaaatcatatttcgtcagaattatattttcacaacgatagatatggtaaaaatgattttgcactttcttacagtaccacaaaacattttaatggagcaagagatttctttttttttttttttttttttgagaaggagttttgctcttgttgcccaggttggagcgcaatggccctatctcggctcactgcaacctccacctcaccggttcaggcaattctcctgtctcagcctcccaagtagccgggattataggctcctgccaccatgacaggctaattttttgtattttcagtagagacaggctttcactatgttggccaggctggtcttgaactcctgacctcaggtgatccacccacctcggccccccaaagtgttgggattacagacatgagccaccgcacctggcggagtgagagatttctaaccataactgagattttgcttattcatataacttaatggtttatgttacaagataaataaaaatgattagtatttggttaaaaaattttaggctggacacggcctattatctaagacattagatatatatcttgcatacaaattcattactagctgtgttatttgtagatattttatgctaatcatttgtagctcctctttttaatgttaacaagatattttgaagagcattgcatttaattatgagaaaatctaatttcttaattttcctgttacagtcttgtttggtgtttttatgtaagaaatatttgcttcactatgatcacaaagattttcctccattatctcctagaagttgtatggtttggccgggcgcagtggctcacgcctataatcccagcactttgggaggccgaggcgggcggatcacgaggttaggagatcaagaccatcctgactaacatggtgaaaccccgtctctactaaaaatacaaaaaatttagccgggggtggtggcgggcgcctgcagtcccagctactcaggaggctgaggcaggagaatggtgtgaacccaggaggcggagcctgcagtgagccgagatcgcgccactgcactccagcctgggcgacagagcaagactcagtctcaaaaaaaaaaaaaagaagttgtatggtttttggttttacatttatgtctatgaattatttcaagttaatttttagcatagaacttgctggaacatgggttaaatggtcaggaaaagtggtaaattaaggataaaaattgctacattctttggaaaatgaaagcaaatagcaagatgatagtgttattcatagagatgaaagtgactgttagacttggtgataaaagctgagaaaactgctcattttggagcacatttaaatatctatcacagaggcaaattggaaggtcagggaaaaaaattggaaaaatgaatctagaactcaggtaacagtaaggatggttgggaaggtttaaattagtaaattggaagatttcatagaaaactcatgaaggttaagtgacctgaggatgcagaagtgaccactgggctaaagtgaagaacaaatatggagagaagtggcaggcttgcatgatacacatgcgttcagtaaagcaaacacatcacaacccagtgagtattctcaatatcagcacatctcttaaactagcaccacaatcaataatgaaaatccccttcattcaccaatgggttctaactcctagaatttatgatttctagtgctctgtattctaacatatattttgctcatctttgcattttgtactcttttgcttaattctcagtggcatatcttcatttggagagatgtcttttaagtctagtggtggcttcttgtcatcctggtcctactcctcctcttcctcgtgttcctcttcctccttctgttctttctcttcctgctccttgtccctttacatctttatctttatttttaccttcatcttcatattctttttcaccagaaatccctcaggttgaccaagatggtggtatgtagctatatgtgccacatgtggcctggagtgtaggactggtaagatgtgactcataacaatatggatagacgatgtaattctgggtttaaaaaaaaaaacctctgcatgacctacacttcagaggcccttagagcttcctcagtaaatttctgttcatttgtgtctctttgggttggtttcctacctggggatgtgacaacatggatcacaggcgttacagtttcaaggtacatttccatagaagaggatgacaaaataattgcctttacatagaaaatgagtcataggaggtttctctttggaattcttaattgtttaccaacagtttccctaaatgcaccaagattccaccctcacatatgtggcactaggctacacgaacttccagctatgacaggaagcatttaagtttctgctgtaaaggaaagaagagattcggggcagaaagcgtcctgactctggggcattactgaactcccctgctgaggaaggaattttggggccaaacagcaacaataagtctatcaagcgtatagcaaaaatattcctgatagtgtcacatgccccacaatatagagatatctaaggataattaatatcaaggtctgaagtgagataattatggtgggcctagaatatgtgaaaacaatgtcacaggaatggcaagaaccaaatgaacagaaataatagagactgataaattatttcaagtcctactctgagtaattactcatgcatcacaacaagaatgattacttcaaactttctgataactatataaacacatgtaaagaaggaagcaatattttccgtattatggattctttgcgtagctttctgaaattcaaaactaaatattgcaagctaactaaaagagatggaatttcttctagaatatcaaccaatacttcaagaaagttgtttaaaaatagcagaaaggtcaatataataaaataagtcaatatcaatattccactaaatcatatttaatgcagatattcatttatattttaaacagtcaatacgtaaagtacctacctgattgttcactttaaagctggtgcaaattaaagtaatatgaaggataataatgctttgcagattactctttaaaaataaatgaaagagatatttagagaatatgtgaacttttagaaaaacacaaataagaaaaaatgtgacaaagtttgaatgaagtaagatttattcattcgtttatgtatatatttacttctgaggcggagtctcgctctgtcgcccaggctggaatgcagtggcacggtctcggctcactgcaagctccgcctcctgggttcacaccattctcctgcctcagcctcctgagtagctgggactacaggagcccgcgaccacgcccggctaaatttttttgcgtttgttttgttttgtttttgtttttgttttttttttgagacggcgtcttgctctgtcgcccaggctggagtgcagtggcacgatttctgctcactgcaagctctgcctcctgggttcatgccattctcctgcctcagcctcccgagtagctgggactacaggcgccaccaccacgcccggctaattttttgtatttttagtagagacggggtttcaccattttggtcaggctgtctcgaactcctgacctcaggtgatccgcctgcctcggcctcccaaagtgctgggattacaggcgtgagccaccacgcccgacccgtaaaactcttaaaataagaggatcatggccgggtgcagcggctcttgcctgtaatcccagcattttgggaggctgaggtgggccgatcacctgaggtcgggagttcgagaccagcctgaccagcatggagaaatcccgtctctactaaaaatacaaaattagctgggcgtggtggcacatgcctgtaatcccagctactagggaggctgaggcaggagaatcgcttgaacctgggaggtggaggttgcagtgagccgagatcgtgccattgcactccagcctgggcaacaagggcgaaactccatctcaaaaaaaaaaaataataaaaaaataaaaggatcagaaataaataatagtggagacaaacgattgtgatgccctaccttgttttaacctgattgtctctctcagctgagagagccaaacagactccatttttgtttcttcacttgcagcccccttatccccctcccttaaggacataactagtgcaagctgactccaagcacatccaggaatgcacttactgatagacactgaggcacgctgtaccagcagctcctaggaacgcactcagttaatggtacccaaagcccctgcgtttatcactttgtgataattaagcccctgcacctggaactgtttattttcctgtaaatgtttgtgtaaccatttatcttttaactttttgcctgttctgcttctgtaaaaattgcttcagctaaactccccctcccctatttagatcaaggtataaaaagaaatctagccccttcttcggggccaagaattttgagctctagctgtctctcggtcgctggcaataaaaggactccagaattagtctcagagtgtggcatttctctataactcgctcggttacaacactatagccaaagattacattcataaagatatttttacaatataggtgtcttatttaatatgactccaatctaaatggtaatttttctaacctttcttaagtaattataaaatgtcaaaattataaacaattaaaaactaaagagaaatgaagacaatggatagcaacaaaagctaattgctaaatatgggggaaaaaagccaggcatggtggctcatgcttgtaatcccagcactttaaggcaggcgaatcacttgaggccggttctagaccagcctggccaacatggtgaaaccctgtctctactaaaaatacaaaaattatccgggggtggtggcgcatgcctgtagtcccggctactcgggaggctgaggcaggagaatcgcttgaacctgggaggtggaggttacagtgagcagagattgcaccactgtactccagtctgggcgacagagtgagactctgtcaaaaaaaaaaaaggaaaaaaagaaaagaaaaagaagatataatgtttctgcaatctcatttcagttccacttatgataatagatacattatgtaatttaagtcactaacacttgagggcaaaaaaacagaataaacacaaacgtgtgggataaggggatgctgaccccactgttagtgatcaccttggttggagacccaggttttatcatacagatgaagcctgcaggtagcaagtttcagagaaatagattgtaaatgtttcttatcagacttaaggtctatgctgatgttattgctgtaggggtagaatgaggcatgtccaaccccttcttccataatggcctgaactagattttcaggttaactctataatgctgagaggagggggtccattcagatagttgggaggcctttgaattttatttttggttatagtttctacattaaaaaaaagaaaaaaattaagggtcgcgtcaattctcaattgtcaacatttttaatgtattgtatgcaatatatgtcaacttttgtgttgagaaatgaagatcaaatcgtattcttttatcctgtgtatgtaataggctttgctgaccctagtttgatgggttttttcctttgtcctctctttcttggattgagtcctcacagcgcggcggactgcggcgtggtaggaactacaccacccagaatactgtgcgccgagcgtgccggggccttagaccaatcattgcccaggaaaggggcacctccgtaagtgcgcaatacgccagaatcttccggcgtctttccggtggtggtcgtttttgctgcctgcgagcgcgtccgcgggctgggcgtttccggctcgctgggtccgggccaggtaactggagccggaaaccggtggaggtggtgtccgcccgcagaggagcttgcctggtctcggtctgagcgtcgcccagcgatttgccaccgcacgcacgccggatcccgggctttaccgcccgcctttccaggccccgccccgcctaaagtcccatggccgaggcagcgctagtgattacgccgcaggtgagagcggagtcctcggatcctcacctgggtcctgaggccccggactggggtcacctgcgtgggtctctgcagttcaggcctcttctccaggacagcgaggagttctgggtggggtcctcagagctgacgggcggtgaggtgaagaagggagagcgttgcgtaccgtgggggctgcacgcgcagagcctgggaggtgcgccggggtcgcgagcattcggaaacttgggggcggacctgtgtctgcagggagcagagagaatgaggagaagaaggcacggctgccatggcagcctgagcaaccggggtttttaattctgagtctttgggagccatggagggttgtgaactaaaggagaacacgatctgagtgagggtctgaaaaaatatttcaaaggcaatgagtggagaaaacagactgttacggagtgatgggggtggacgcagggatactggtgaggagactgctgtagtaggctccaggaggattatggtggattctggaccagacgggttgctgaagggacctaagtaataagaatcttggtagatcttaaaggtaaagccagcaggattttctgctccatcatttgtgcctatgagcaaaagtgggagtgaagtatgatcccaagtttttcttttacctgaacatctggaagagttgacaaagaaatctggtgagggagcaggtttcagggaaatagtaggagttgaattttggacgtggtgtttctaaattgccacagagtgaagttgttacatgggcagttggaatcataagtagaaaattcatgggaggggactgactcagtgatgtgtaaatggagacaggctggggcgtagactcaagccaagccttaaatttagacgggaaatcttaaggttttactttgagatgaagagagggagggctgaggctggaggctgggaaagtgtgggtcggccttggcgaagctgcctgcagataggagggccatggggttccgggggtacttccaaagggaatgtgtaaggaatacacactgcataggatggatttgagggtgggacactgtgtagagtcaccattcagaagacttggcgaactgttcactctatgtggagccagagaaaggtcagccagactagcagagaagcccaagcccagcaagagcagctctcccaggaaaatacaagtttagactgtatagatttaacaaattaaatttatgcaagcaattagttaaccgaataaaatgtcactataactctgtgctctaataaaaaataaatgtttgttttttgtcatgctttcctggcacagaattcctaaaatcgttgtaatttcctcagtgaaaagtgtcttgtgataagtcatggaccgcataacaacagtgttgaccacatcagtgacggtggtcccataagattatgataccatatttttactgtaccttttcattttctttctttctgatcaggaggcaaactgcattttctaagtttataaatgtttaaatgcacaaataattatcactgtgttacagttgctgacagtatttagtatagtaacttgctgtacaggtttgtagcctaggagcaataggctataccatttagtagttgaacaatgaatgtctgaacagtagttcccccttatcctcagaggatacctttcaagaaccccagcggaggcttgaaactgcagatagtacccaacctatatatactatgtttcttcctagactacatacctgtaataaaatccagtttataaatgaggcagtataggagatgaacaataataactggaaataatatagaacagttatactttataagttaataaaagttaagtaactgcagttgagacaataaaaaagcaaaagttaaattataaaaaacatgtgaatgtggtatctctctaaatatcttactgtactattcacccttgtgatgaagaagggactaaactcgatagagtgagatttcctcacactacttacaatggtgcactgttggccagcgcagtggctcacacctgtaatcccagcactttgggaggctgaggcaggcagatcacaaggtcaggagatcgagaccatcctggctaacatggtgaaaccccgtctctactaaaaatacaaaaaattagccaggtgtggtagtgggcgcccgtagtcccagctactccggaggctgaggcaggagaatggtgtgaagctgggaggcagagcttgcagtgagccgagattgcaccactacactccagcctgggcgacagagcgaggctccgtctccaaaaataaataaataaaataaataaataaataaataaataaaggatggtgcactatttaaaacatgaattgtttatttctggaattttaatattactattttcagactgaagttgaaatttaatacttataattttcacactgaagttgagtgtgggtaactgaaactgcaaatagcaaaacagctgataagggaagacttctatacttgagttttatgagatggcttagggtgagcagacaaggtggagtctctagatagcctcagagtggagtcagtcaccagaaaaatcaagtgattatagaatttgaactttgagccccacctctggcatccagggaggggagcagagatctggagattaggttatataaaatcttgaacaatgagttctagaagcttcaaggttgtgaacacttggaagtgctgggagagtgacgtaagagagcgtggaagtactctgccttaccccctctcccagtaccttgccatatgcatcgcttccatttggctgttcctgagttacatccattatcataaactggtaaacataagtaaaatattttcctgagttctgtaagtggttctagcaaattattgaacgtaaggagagaggtcatggcagcccccaaatgtgtagccaagtggagaaaattacagtggtctggacattggcttgcaattgccatatgaagtgagggcagttttgtacgactgagcccttaaacctgttggtttagctgcaactccaggtagttagtgttagaataggattgaattgtaggacacctagttggtatcagaatcagagaatggtgtgggaaaagacactacatatttattatcaaagaagcacagaagcctctcataatttgaaaagataccacattcacataaagacttaaatggcaagtaagaaacaccagagttttaaaaaatgtttacagaaatcttaatgcaatagtcagtactagctaaatcttagcattggacacgtatgaatgagtttgatgcctacgatggcactacgagatagccaccattaagtgtttccattttacagatgaaggcaacctcagagaggttaggtctttgtctagtgtcacacagttggcaagagcaacttaccctttgtaaatgccaccttgaacacctgtatttcatagcctccctcttcctacagattcccatggtaacagaagagtttgtgaaaccatcacaggtaagtggaagaagtcccaggtcttcactggccctgttccctaaagccatgggtctggcccacagatgcaggtaacaataatgtcctgggactctttttccttcatcttgggtccctggggccacctcaggcccaggatgattaatcagggtcaggagttatacagagatgttcccatttctgcatccaataggatgaagtgatgaaaggtttcctgggcataggcgccagcatgtccaaatgcttagagatgagaatgatatgggcatatatagggaactgcaagtctgtgcactgtggccaaaacttttgcagtttgagctgtgacagaactaacatgagtttctttttccttctttacaatctcacagatacatgatttgtccttttcgtagatcttagcaaactcagagtacaatattttttttcttgttaagaactctcaccttttcacttaaaggaagtacttcacaggttgtcttttacatatctgaatggctggtattatcgctcttgtgctttgggggtattaagtaaaataagcgttacttgaacacaagcactgtgataatgagacagttgatatgataaccaagatggccacatagtgattaacaggcaggtagtgtattcatcatggatctattggacaaacggatgattcacgtcttgggcagaacagcgtgggacagtgtaagattttatcacactactcagagaagcacgtcatttataatttttgggttgtttatttctggaattatccatgtaatattttcagaccacagttaaccagtagtaagtgaaaccatggaaaacaaaattgtggctaagatcggggacgactgtatatgtattcagtgctatacattttattctaagcaccgcttcgactgcatctcacaaattctaagttgtgttttcatttcatttagttcaaaatatttttaaatttatcttgagtatttcttctttgttccatgcgttgtcttgtttacatctcccaggtattttgggatttgccagctctctttccattactgctttctagttgaattccattgtgattgcagagcagaccttgtattatttctagtaaatttattaagatgtgttttataactgtgtattgtaaactggggagtaaatgcccttcgtggggtctctaggatcattccaacactgccgtggaaatgaaactctgagaagcataaaggatttattatattcataggtcctcatagagggtggcacagcaaaccatgcatggagccatatggaaatagctctcagggagtggactcaaccaagcaggcagggagccaagagggagagcaaggacctgtgggcaggtgcctttcctactgtgtttgaatgtcattcagtcacagtcaaaggatgaaaagaaggggaggttgtgacagggaccagtcttagcatgctggggacctggtcaccggggtgggttgctcataatgtattggggatgttgaagcatcaggaaaataggaagttttaaagatatataaaacaggcccagaatgtggtctgtcttgttgaatattccgtgtgagcttgagaacagcatgtattctgttcttgttggacaaagtaatctaaagatggtgattatgtccagttgattgatggtgttgttgaattcagttaagtttagtggttttctgcctactgtatctgtcagtaacagaaaagagtgtggaagacttcaattatgatggtggattgatctgtttctccttgaagatctgtcagtttttgcctcatatagtttgatgctctgtggtcaggcatgtatgtgctaaggattcttgtatctttttggaaactgcctcaacctcccgagtggctgggattacaggcgcccgccaccacgcccaactaatttttgtatttttagtagagacagggtttctgcacattggccaggctgatctcgaactcctgacctcaggtgatccacccgccttggcctcccaaagtgcctgtgatgttttcttgatagctacacatgatgagctcagtaaaaggaattgctgtaaataggcctttaataatgtggtggtgaggtgtgtcagcgggcaggggaagcattttaagtcccacagttaggtctcagtgttttagtgagcctgttcctcttgactgaaattcacatgtgtttctaaattgtgtttattatgctttttctctcccattatgtggaagaggaatactagagtgggttgtagttggttatttcccttcccccagatagattaggctctgataatacctctgcaggttaggctctgattaactgttgtctcccaagggcaggctttgtttagaggaacacattgctatggcatattttaaaatgattcattttcccctctctgctggaagcacaaggggatttttttttttccagtattcaccatgagaacttggttaagtttctggaggtaaatattgcaagattgtgggggccccctatcagagtgcctcctgaattttcagctcacagaattgtccacacagaccttccagcaatttatgcattatagattgggttttcctaacctagcactggtttgcatgatggtttcctttcatgagtttctgctcctgtgagccttgattctcctgtatgccctcgtttgtctctccaatcttgtgggcagcagtgtgtgctgtgcccttatctttcctgtgtggatcctagaattgtccatttttcagtctgtttaactctttacttgctattgtgatagagtggccacttccaagctccttacatgcagaatagaaaccaaagtccaggagttaggccttcacaatgtggagtctcatgttgggacttcttggtggtggtgttaggtgcacagcaagagacagacacgtggagttcagggaagggatccaagtgaaagctatccgtcagccagtggctggcctgtggaccatggcagatttaagaggaacactcttcaggtcatagtggcagtcccatcagtgaggaaggatgtagagagtattctctaatgactgggtctcttgcatggtcacctagatagaagtgggaaccatcactaagacagataaagaagagtagtaaccatgggtgtgtgggggtaggatgaaacgggtgtccagctgttggcacagtctttaaatggggaatgttaagagattcattcagaggcaaagcagtaatggaggtcaaataacaccaaggtcagggctggtgcttttcctcccttttgctggctcagacttttgttggtaactcttggtagggcctaagtagtttcagacggtgtgacagattaggttaaaagcaaatgagattgactgggagagtcattcagcctgtggtgggagcagctgggggccaagctttgactgagtataggtggagagaggaaagatatgactggtgtggggacagcacaggcaacactaaggaggaagtggactttggcagcctgagctcacacaaggtctgagtggctgaaattggaacaaagagccaggccacatggggacgtcttcataacagtcctgagactgcctctgacttgggtctaacaaagatgtgaggtggtgctggatccttgttgcatttagcaagcgctgcctggatcccttgagcagagtggcatgtggagaagccaggtgaagtacctgtgtcatggatgctgagggcagtggagttcaaggtgtagcagtcacgatctggagatgtgttcccatgaatggtgtgcaaccggggagggagtatggctgtactcaggatcctcgtactggcactttaaaccaagatggtaagcacaggtttcagtatctgggtctccagggaggtgaactagcaggagcatggatgagattccatgatgtaaggcccagagcccagtgggagacaccataaggacctggtatctcctctgagttggagaactagggaggagcgagatttactggggttcctggggattgagtctgctcatgatttcatctgcccccatcatgcagggccatgtgacctttgaggatattgctgtgtacttctcccaggaggagtggggcctccttgatgaagctcaaaggtgcctgtatcatgatgtgatgctggagaacttttcgcttatggcctcagtaggtaagatctcttaaaaccacaccatcaacctctgctggactctgctcttcccctttttccaggagtttcctgtctttcccagagttggacatgggcccttcttctttccttggttcttgacctgtggaagacataggcgttgtggttgccaggcctgggttttttctgccccaacatctactgtcctgaagccttttagttaagagtttgggttcagactcttgtaacttgcccaaccgacaccacttggttttgccactccttgctaaggtgactgttcagttctgtggtggacctgtgttacaggttctccccctgcctttagtagacgtgtctttggacctgcctttctcaggaattacaggtacttacatggttgctatttgtagggaaccctagactatgacagcaagaccccctcccaagggtttttttgtaataaatttccctcctgtagtctgtcatgggttggcgcaccctgggccagtgttgttgacccacctccctgtttttcccttaggatttcttctaccttccaggacccagatagtctcctgacttaagctggggacaggggagaggcctgtgttcctgaaagcgtagtgaagtcttcagccacagcaaggggggttaacagggtttgggacctgtgagtaggagcagtgggagggcatgatttgagggctgaactcaaatcataccaggcaaatgtcctatgttccccactattttggtgccagggctcatggccatacctcatttttctcttttctctgcctgcttgacaatttgcctacttgtcgtttctactgtgattgtcccctacctctgttctccacatctctcctgttcctgttctgcagtgttctccaacattagcctatacctaatgtatttaatattatgagctgtgcagatacagatgttcctcagctcgtgatggggttatatcctgataaacccattgtaagttgagaatatcgtaagtcagaaatgcatttaatacacccaacttattagacatcctagcttagcaacacagtagagtgtcagttgtttagcctggtgattgcatggcttactgagagctgcagcttgctaccactgcatcacaagagtatacacactgcgtatcactagcctgggaaaagttcaaaattcaaagtatggtttctactgaatgtgtcactttcgtatcatcataaagtggaaaaatcataagttcaaccattataaatcaaagactgtctacttaagctctcaaacatcagctatccagttgtaattgcattttcctggggtgacacacattctatgcaggtctcccctgtctccatcagatgacgtcctattgaaaaccattgacagagaagggagttgtatgccccctgcctctcttcccaccatagtaccccattccttgttctcttgctggttatgggtcttcccctacatggtaaccttaagaggcctaatactgcaagtattatcttccttgacctgactccagctcccttgtcctgaaaacaaacccatggcctgggtgcaatggctcgtgcctataatcctagcacttggggaagctgaggtgggaggatcacttgagctaaggaatttgagaccagcctcgacaacataatgagacctgtatctccacaagaaattctaaaaaaaaattagccaggtatggtggtatatgcctgtagtcctagctacttgggaggctgagatgggagtgtcactggagcttggaaggtcaaggctgcagtgagatatgactgcaactgcactcccatctgggtgacagagcaagaccctatctcaaagaaaaaccatggactcgtccctccctgtgttccacaggtatttgtaatggagctgttcccttctaccaaagtctgcatatacttcacttgcatttttatgcttttaggttgtttgcatggaatagaggctgaggaggccccttctgagcagactctttctgcgcaaggagtgtcacaggccaggactccaaagctaggtccttccatcccaaatgctcattcttgtgagatgtgtatcctggtcatgaaagacattttgtacctcagtgagcatcaggggacacttccctggcagaaaccttatacgtctgtggccagtgggaaatggttttcatttggttctaacctgcaacagcaccagaaccaggacagtggagagaaacacatcagaaaggaggagagcagtgccttgcttctgaatagctgcaaaattcctctgtcagacaatcttttcccatgcaaagatgttgagaaggattttccaaccatcctgggccttctccaacaccagaccacccacagcagacaagagtatgcacatagaagcagggagacctttcaacaaagacgttacaaatgtgagcaagttttcaatgagaaagttcatgttactgagcatcagagagtccacactggagaaaaagcttataagcgtagggaatatgggaaatccttgaactctaaatacttatttgttgaacaccagagaacccataatgcagaaaagccttatgtgtgcaatatatgtgggaaatcattcctccataaacaaacactcgttgggcaccagcagagaattcacactagagaaaggtcttatgtgtgcatcgaatgtgggaaatccttgagctccaaatactcacttgtggaacaccagagaacccataatggagaaaagccttatgtgtgcaatgtatgtgggaaatcattccgccacaaacaaacatttgttggccatcagcagagaatccacactggagagaggccttatgtgtgtatggaatgtgggaaatcttttattcattcctatgaccgcattcgacaccagagagttcacactggagaaggggcttatcagtgcagtgaatgtgggaaatccttcatatacaaacagtcacttcttgatcaccatagaatccacacgggagaaaggccttatgagtgcaaagaatgtgggaaggccttcattcacaaaaaaagacttcttgagcaccagagaattcatactggagaaaagccttatgtgtgcatcatatgtgggaaatcatttatccgctcgtctgactacatgcgacaccagagaattcacactggagaaagggcttatgaatgcagtgactgtgggaaagccttcatctccaaacaaacacttcttaagcatcacaaaatccacactagagaaaggccttatgaatgcagtgaatgtggaaaaggcttctaccttgaggttaaacttcttcagcaccaaagaatccatactagagaacaactttgtgagtgcaatgaatgtggaaaagtcttcagccaccaaaaaagacttcttgagcaccagaaagttcacactggcgaaaagccctgtgagtgcagtgaatgtgggaaatgctttagacaccgcaccagcctcattcaacaccagaaagttcacagtggagagaggccttataactgcactgcatgtgagaaggcctttatctataaaaacaaacttgttgagcatcagcgaatccacaccggagaaaagccgtatgaatgtggtaaatgtgggaaagccttcaacaaaagatattcccttgtcaggcaccagaaggtacatataacagaagagccctagcaattgttgggatgtgtaattgtcttattcactgtaggacaccagagagctgatttttcaagggatccaacagacagaaattcaccctcatacatctgcatatcactagttgaaagattcactacaaggtccaagtacttgggaagctttctagagattacttgtactttctaatctgcccagtgttacaacagacactaccatgtggcatatcctcaccgttttcatcagtcactcacatgtgctcaaggaatgcagaccactgtgcttaccaaattctgaagggaataatataataaaagcctgttgagggtcctcttccatcttgctgaactgttcgaggcaaagacaaaacccaactttgaccaagaagagcaatctggattcttgtagcccatggaggtttaccttcttcataggttttttttttttttatgtgattgccatagtgggatattccctctcccacattacccaagagggaaatgggctgtcttaccatgtgctgatgtatgtgctctgccagtgtgaagggtgaacagctccaactttatgtccccccagggacatagtatgagatcggaaaatagttcttagtcctgtttgtcttaatttttattggtttccaaggtctcctaggaaggagagcagagctgtgtggtcctaatcatggtgtcgatgccagatttatttgtaggtccagaggtctccctgagaagaggcatttgtgacaaactcaagtgctgggacctgcatgaattgtttatttgcagtgatgcttcatatttcccagcactgttcatggtatcttatttcccaggtccttcattgtagccatgggcactgaaggactgaattggtaggtaggtcactggttgtaagacctactggggccaggtaagaacagtaattggcccagacaggtaggtgtgataaacagagtagaaaagattgtggccaagaagagtgaatgtgtcccatccaaaggtgcatccagatatgtctgtgttactatggcttcatggtttgggggtatatagaaattctcaggacctcagacctttgattctcctttagcaacacacatcgtcagcataaggcatctaaagattttgtggactcataacttatgtactgtttttgagatgattgctgcacgggcaggaaagcaggatttgagagaacatacaccttgccttccagatatgtggtttttgtgattcacccagatctgttgtgccagttaggaattatctttattacttcccgtttattgccactgctgagaaggctgtccttcctaacttgtgaggagatgaatccttaataataagtaaatcttgtgttatcctatagtctggttttccaaaaggagaggtagatgcatatttttgtgtggaaccatttatcttaaaacattgaggtgcagttttcatacacaaaaccttctatctttttaagaactgtctgtatggtttattgcccagttaatgggttttgatagtcatgttatctcagtaagtgtcttgtcttagaaatatgtgtgtataggctgggtgcggtggctcatgcctgtaatcccagcactttgggaggccaaggcaggtggatcacctgaggtcaggagtttgagaccagcctgaccaacatggtgaaatccagtctctacttaaaatacaaaaattagccaggcgtggtggcgtgcatttgtaatcccagctacacaggaggctgaggcaggagaattgcttgaacctggggggcggaggttgcaatgagccaaggtcgcgccattgcactccagcctgggcgacagagtgacacttctcaaaaaacaaaaacaaaaacaaaaagaacagataagaaatacgtgtgtatatattctattttgtgtgttttcattcaccttatttcattcagtcttccaaatgaaatgttcttaattttgatgaagtctaatttgtctgtttgttcatttactgttattttggtgctattaaaaaaattttattccttggctgggcacggtggctcacgcccataatcccagcactttgggaagccaaggtgggccggatcacctgaggtcaggagtttgagaccagcctggccaacatggcaaaaccccattctactaaaaatacaaaaattagctgggcatggtggtgggcgcctgtagtcctagctagctacttgggaggcctaggtgggaggactgcttgaacccaggaggcggaggctgcagtgagccaagattgcgccactacactccagcctgggcgacagagcaggactcccatctcgaaaaaaaaaaattgtgtaattataggaactttggaaagattgttattcaactgatattacataaggtatttattttgtaaattatttgcaatattagaatttctgtcagcctacagtatttctctgctgttattctgaccttaacacattgaaagagttcttaattttgcttcgccatcccttacgcatacttaatttttgttattttgccaaattccaattatctttacaagatcattttattttttaaaagagctaaccagacaagaaaatttgcccttgttattcccacttcctatatagcttgtctgccaaaacctttatgccattattctcatcagtctcattctcaggggtttctctgagcaaatccatataaaagtggaactatatgacatttcctgccccgttctcatgcttcatctttaataggtaaatttaccattttaaatagttttaaaattatcttcactgtgtgtactttggatttaatccttactaatgattaagatgctctaagaatcaatgtaaaactaattttaaagccagcagcataattttgtgagttatgcctgagtattcaaaaatcctaacaagtcaaaaatattaattaaaatcaatatgtttaatctttccaattaaatacttccattccataaacttcagaaccaaagttagataccaacaagagactgaagataaatacagtgtcaatagtatcaagggactagcccatataatatacttgaaaatcgtattaatcaccaataaagtaccccaccataaacaaaatacacaataaaaagtcaagatacaaataaagacaggccaacatatgagtagaccattgacagaagaggaaaaacaaaaggcaatgaaaggatatgaactaatgttcaaatgtatttcaatatgagaaataccagatatattctatatcactttaaacttctaaagtaaaaactggaaagctgggtaattctaaatattgtctgggacacagtgatacagaaacacttttgtccatcttatgggagaggaagggcaatgtataacataattccagttacatactagatcaccatatgacctagccattcagctgcaaggtacatttctcatgtatggccataagtttatttagaacataatactgatgaccttatttttaaggttgaatcaagctggtggtgatatatttcatagcaggaaaatggaggaaatacatgtccataatcagaggatttgaatcaaggatgaaagcttcatgatgtaaaatattacatggcagttaaaaacaattggctagaggtaagcccatgaaatataggatagaaatataatattttgctgtagtttgagtgaaaaagaaaaaaaaagaattgtgaggtctacaataaaacataatttaaaaataatttaataccacaaaaactccaaagaaaaaaaaccaaaacaacccagacacttcttactagaacatatgttccatgcttctatctcggcttctggtagccccgtgtgttccttggcttgaagatgttcttcctgtgtcttcacatcgtcttccctctgtacatctgcctctgtgaccaaatttcccatttttctaaggacacagtcatagtcaattaggaactaacctaatggattaactaacatgattacctgaggttctgagggtaacgactccaacatcttttttggagacacaaacacttaacattgccctatgaatttctgcagttcttcaaagggcagagtgaataataaccacagcaatttcaagacacacaggcttccattgtgagatggcttgtttaaagaaactattaattccctacactcttctgatcactctgttgttcacattcattttaggatttctcttccaaatcacttctggtgctttccttcttgcttctttcatttccttcggtgttgtagttctattatgtttttattccgtcagcaatttcttaaatttctcttttcaaccttaagcagtttttctgaaattataaaatttactgtgaacatttcaaacatttccacatgtgcatgaagttaaagtgaactctgacattcccctctaccccatcccttccctccctctacacccaaggagcaaataccatttaactgggtgaggatccttccagacacattttttgtctgcttacaaatattaagatttctaattcgtctttgcatgaccgacttgccgagttaatttaccgtccacatttcctctgtgacatttactgattgaagtgcaccaactgtgaatggtcataactagtcccacccccacaatcatttctcacagattaagcagcataagagcatagtgctttttatctaatttgttcattaaatgtaacaaagttacaaaaacatgaacatgaaaacgttttacctctgccgggcacggtggctcacgcctgtaatcgcagcactttgggaggcagaggcgggtggactacatgaggtcaagagttcaagaccagcctggccaacatggtgaaaccccgtctctactaaaaatacaaaaaaactagccgggcatggtggtgggcgcctgtaatcccagctactcgggaggctgaggcaggagaatcccttgaactcgggaggcagaagttgcagtgagctgagatggcgccactgcactccagcctgggcaacaagagtgaaactctgtctcaaaaacaaaacaaaaaacatgttttacctcaatcataaactgtggaaaacatacagaagttcacaacttttactgtaagttcaaaacttctactgacttaaaaacgggtgctaaacaagtttaagtcaatatattgcacctgttctcatgtgtttttcctatattagacagtaagttccttccctgctcaagggcaggacccatagcccagccatccactgcatcccactcttctaagtatgaccacaacagtgagtggccatggagctaaatgacaggtgtctcatgagattcttgcctatcacagcagcaagttcatagtagatccttgtaccaaacacttcagtgaagactgtatggaaagagctggaagctaagaaaaacctagggtgtcctttatcccatggaaaacactcctgctttgggacaaactggggcctaggtcctcaggcctggaaagaaccctttgatgacagccaatatgtttctagaggggtttctccaactctcttgaacccagggccttaggtacaagtacagccacagctacaatacatgcagccttccagagagaggatgcaggagggtgggggtcctcaagagtcaactctccttcccacaggagaggaaactgtgcactctgtcctgaaaaaacaaaaacagagaactcttaactcaccaagaattctatttataatatgtgcaaaaggaccacagtaaaaggtacatgcccactatgaaaacatgaatatatatgcagtgctttaaaaggttgtgaggaaagctcaaagtgagaaaatgataattttctatttttcacacgttttaacctaacattatctcatgtagcttgaaaactaaaagaaaatctcacaaaaggaatttcaaattaccagattcaggctaagtacagtggctcacacctgtaatcccagctttttggcaggctgaggtgggtggatcacctgaggtcaggagttcgagaccagcctgggcaacatggcaaaaccctgtctctactaaaaatacaaaaattagctgggcatggtagtacatgcctgtaatcccagcttcttgggaggctgaggcaggagaatcgcttgaacccgggaggcagaggttgcaatgagccaagatcgcactcctgcactccagcctaggcagcggagtgagactccatctcaaaacacaacaaaactaattaccatattcagtgctagcaccaagggactaaggtcatggtggttaactatgaaactcacgtaaacctgcccacgtatatcctgattcacctgttaaaatgctaggcactttattttgtagcaaaacttcacgcaaatgtttataagatcagacaatgagattcctctccatgttgttttcttgggtttactgggtttaccatggattcatcttagttgtgtgttttattttgcctgttttagctataattcaatccctagaaaaatgctgagggggacctaaaaatacccctctacacaggattaaagaatctgataaacaccagaaagaattaggactcatctgagaaggccaagcaagtacaaagtgatcactatgttgccagagaaaataaagacaacaaacagacagaatggaatcaggaaaatgtgagagtgctgagcatttgaaaccatattaggctaggtgtggtggctcacacctgtaatcccaacactttaggaggctaagcaggatgatgacttgagtctagcagtttgagacaaatctggggaacacagcaagacctcatctatacaaaaaaatttaaggctgggtgcagtgactcacacctgtaatcccagaactttgggaggccaaggcaggtggaccacttgaagccaggagttccagaccagcccagccaacatggtaaaaccttgtctctactaaaattacaaacattagccaggcgtagtggtgtatgcctgtatcccaagctactcagaaacttgaggcaagaggaccatttgagcccaggagttcgaggttacagggaactatgatcatgccactgcactctagcctgggtgacagagcaagtccctgtctcttaaaaaataatgagtttattaataaaaatcaaagccttaaacagtcttaggtattgcacattttaatgtggtgcacattttaatgtggccatctgtacatgggttcttctcaccctagatataaaaaagaagtgtcacatgaagatgttctcagtattctaatttctactaaattcaagaatctcatgacacaagccttcatatttctcacaaagaattactctcctcatggatatcctcccagagatgtctggatcaaaggcaacttccaagaaatgcctgaagagctgccctcactgtctaactctgacaaaggatggcagtgaatgtatgttaaaaaaaaaaaaaaggaataaaacccctttacctctcaaacattcccctaccaaaaaataaaactgatcttacagggaagtctgtaaggacataaagcaagaagatacctgtaactgaaggttttcataagttcatagagaaaatcccaaggtgggtcaaattccagcatggctctttataggacaagcaagtgacaacctggtcacaaagttttctcacatcaataacaattatgtagtaacttttcattatgattctcagatagtaagatttctgctctggccaaagactgtccttaatagttatatttggaatgtctttctccagcatgagttctctgatgttgatggaatgccttccacatttccccctggtatgaatccttctgcaatgagtgagaactgagtggtgactgaagggatccttacattcactgtattcacagggcttctctccaaagtgactgctcatgtgttagttaagaaagagctgacaaaaaaaatgaaaagtttcctgacattctttgcattcgaaggacttcttcctacagtgtgggtcccattatgaatgataaaataacagtgggtaaaggccttgctgtattcattgcagcaatagggttctctcatgtatggaccctttggtgctgcagaaggtgtgacctgcgtttgaaggccttcccacactcgatacacttgtagggcatctccccagtgtggatgacagagtgctgaatgaggtacgtgctccggtgaaaggctttcccacactgggtgcattcatagggcttctccccagtgtgaatccgctggtgctgtatgagttctgagctgcatctgaaggcctttccacatgccatgcaatcatagggcttctctccagtgtggatgatgtaatgttgaattaggtgggctctattgctaaaggctttctcacattctttgcactcaaagggcttttctccagtgtgggtcctattatggcgaataaaagtagaccggtgggtgaaggcctttcgacattgactacactcatagggtttctctccagtgtggattggatggtgctgcatgaggtacgacctgcgtttgaaggccttcccacactcaaggcacttgtatggtttctccccggtgtggatgaggtagtgccgaatgagagttgagctctggctaaaggctttcccacatgcattgcattcatagggtttcattccagtgtgaaccctctgatgtcgaacgagataccacttcctgttaaaacctttcccacactgcttgcatttgtaggggtttgtccctgcatgaatcaaggcgtctttccctggttgctgtgagtcacattcatggagaacatctgctgataaccactcttgtaatgccctggagtgcagaccatcatctgtccccaaaccttcaccttcaaggctcactttcccaagatgggtctccttgtggaggtctgtctccggtgtcactttacctttctgcatttccaaaagcccttcctcatccctagctctccccaacctcgaatcacttgaggttgaagattccagagtcaggcttccccggagaaaggcccgctcagataagactggcgggtaagtggttggctctctggtatgaacttgtgctctgtcacctgaagggcatcaacaaacaaaggaggggtcttttagtgataaaatatagaaaaacacaaaataaccacttcagtaggaaaatgaagatgaaaatagtgcctatgatacttgctgcatttttacatctctaacccaggttaccaaatactgcttacggtccttgtatccttgacaccattaaagggaaaatctggagggcaggctggaccgggggacagaggatccggagtaaagacatttctctttacagttcagagtaaggaagagataatagagttttgatgacattgtctgaagggcatttgctttaagaattgaacgcttacatccatctgacaagggattaataaccagaatatataaggagcttaaaccactctataggaaaaaatctaagaatctgatttaaaaatgggcaaaagatctgaatagacacttctcaaaagaatacatacaaatggccaacaggtatatgaaaaactgctcaatataattgaccatcaaagaaatgcaaatcaaaactacaataaggtatcatctcatcctagtcaaaatggcttttgtccaaaagacaggcaataacaaatggtggcaaggatgtggaaaaaagggaaccctcatacactgttggtgggaatttcaattagtacaactgccatggagaacaatctggaggttcctcaaaaaactaaaaatagagccaccatatgatccagcaatcccagtggaggtatatacccaaaagaaaaaaaacatcagtacatcaaagagatatctgcactaccatgtttactgcagtactaggcacaatagccaagatttggaaacaatttaagggtccatcaacaatgaatggacaaagaaaatgtggtgtgtatacacaatggggtactatttggccataaaaaaggagatcctatcatttgcaacaacagggatggaactaaaaatcaaaacaactgaactcatggagagagagtagtaagatggttactggaaactgggaacggcagtaggatggagtaggatcctactccatggagtagtgaggatggttaatgggtaccaaaatgaagttagaaaagaatgaataagacctagtatttgatagcacaaccgggtggctatagtcaaaaataatttattctatactttgaaataactaagggtataacgggattgtttgtaacacaaagaaaggataaatgcttgaggtgacagatacttcctttaccttgatgtgattattatgcattgtatgcctatattaaaatatcttatgtacccacataaattaaaaattagccaggcgtggtggtgcatgcctgtaatcccagctactcgggaggctgaggcaggagaatcgcttgaacccgggaggcagaggttgcagtgagccgagattgcaccattgcactctagcctgggcaacaagagcaaaactctgtctcaaagaagaaaaagaaaaataaaaataaatgaagccttttggtgctataagagtttagggaagttgcacctaatgagactggaaagaaaaagagatcatggaaggctttctagaggaggtgtcccataagctgagtcctaaaagagaagccagagtcattgccagagagaggaagtgggcaatgggttgaaggtgaggaagtaaaaatgggtagattcaccctttgggcaccagatgcctggtgaaaccaatataaaagggtgattagagttggagcaagaaaatgaagattccagcacaaaagggatggaagtacacacaggaacaaatggtacaaaaggcctagtgtagtaagatctgacaagtttctgctgtgtcaggaggcacaatgcatggcagacaagagggtactggagacagaatgactcagttcaaatcctgcctgtgtcaagtgggttgatactggaggatgactttctccaccaggtctccaattcctcaactaagagactaggagactcaatttctcaggctgtcatgaggttaaatgagaaaatgcacagttcttgatgcagcgcaagtgttcattaaattgtgggacattacccttattattttcattgctgcgctgggcaatttgggtaatgccagtgacactagcaagaacaacttcagtgctgtgatctgaggaagctagcagctgtgcttcatgaagtggccagcatcgcatgcttagaagacccgagtgcagcagcagtctcatacctggaatggtggggatgggaaatggtgcggctactctggaaaaatatttgggggtttgacttaaaactgagcacagatctgtctcttgactccaccagtcatctcctgggtgtatatgcaacagaaatgagtgtttatatccactaaatattatggaaaatagtattcatagcagcattcttcataatctccaaacaaggtaaacaatacaaatgtcaaccaataggagagtgaagaaacagatcctgatgttttcacataattttatggtacacagcatataggataaacccagctcatggacacaatgatggtgaaaagaagaaatacacaaaagagaaactgctttggggctccaattatgcccattcacaaccaattaaaaactagtccctagggagagagtctaaacagtggctcccactgcaggaggagctattgacaaagacagggtaacagaaactgccgaggtgctggaaatattgtaaatcttgacctagatgaagaattcaatttgcagaaatgcaaaaatttaagctgagcccttcaaatttgtacttattattgtatacataagattttttttagtttgagaaattttaaacaaaaaaatattaaagtcaagtgtaaacatctcttccaaacatgagacaactccaagaagcttggctttacaagtggggtcaacacaagttacagggtattgtaggtgaaaaagcattttgtctgttttcgccaagtgtaagcaatttgagtacacttttttttgtttgtttaaacttatattcactttctggttttgtattgtgcacactttttatttgaatatagataagttgaaggtacagacaaagcagagattttttttaaaaaaagcaagttccctgagaacacagcaggtatgatgcaggcactggcaaagacactgaccatgactagaggtaagatctcctccatagaggacaagagaagccaagtatgagaccgtgcagatgaatctttaagaacattaaatacacatcctatttttaacatgaaattaattatatactgaaacatcagctgctggggaagtggtgaaaatctgaaacacatctgagtggctgcaggagccggtgcagggacaagagctgcccagaggaatggggcagatgtggggagacctgtcaggagcctctggtatggcccaggcagaagattatgagagcccggactagggtgttggtgaaggagccaagggaagcagtggaagtgatggacttaggagatatggatcatttaaaatgagcaggactagggatgaatggatgctgggtttgatgaaggtaggtggagtccaggagctatgtggtgtgtttccagccttctaacctgcttggatggtaagacattctctgaactgagtgtctttttaggcatcaggagctaaaggtgcctctgagacacttaagtggagatgtgggattgagggaatgggaagggaggtatttggaacacagggttgcagatggggctggccaagaagcccaaggggagagcccatgactcagtggtgatacaaatccacaaggcaaatggctccagctacactcatcagcacagatgtagggcagagaaggccaaatgtcaccttggtgtttctcagggcaagaggggcaggaagatatggagcaaagggctgcttccgagtctctgatggtctaactggaggatggatgagtggacggagagggtggaaaagagtgggattcacagcataatgcagacagtaatatcaaggggaggaaagtcccctttctcttgagtccagaaagaaatgtatgacattacatttatgatgattaaaactgttcatgcataatactaactagctgacatttgttgatcctatggaccaggaactgaactaagcagtgtcatgtgttatctctacatcctctaacaactcaatgacacagaaattatatcactctgattttgttgagtagaggagtctgaggtgatgtaaaccaaacccattaattcttttccatgggcacatagccaaatcacatttgtcagtcctgagcatctaggtgtggccaaatgcctagttcttgtcaagactatgtggttgtcaagtatgtgtacaactgggtatgacttctccccttcttcttgttccccttctaccagctggattgagccagagcaaccataaagattcctgttcacagcaaaaggtacctgtgtctctgaataattgtgtggctcagtgctcacctgatgatggacactatgacccaaagtgagtcagaaacaaccaggcccccggaaagccacaatgagcagtttcacacagaaattcagaggcagtggtgccctcacattatctgaagactgccatgactccacatgaccagctggtggctgcttacctgcacaggtagcatgtgagaggcctctcttcactatccacagctcctgcccatgctctagcaggtggaccaactctggtttgggaacccgatgccctgttgatagcaaaagaaatagaataggggtaatttaatgagaaaatgaaagtctctccatcttgcctaggacttcatgacagggtccagacatgaatgcagctgctcccaaagtaagcaaaatgctgatgtgagccctgaaaatcaagggcattgctctgagtgagctgtgttccccataaaaatcatatgttgatgccctaacacccaacgtgactgtatatggagacaggatctttagaaggtaattaaaattaaatgaggccacaagggtggagccttaatctgataaaattatggcctcataaaaacagagagagatctctcctctgtccctccaccttgtaagaacacagcaagtcagccatctgcaagccaggaagagaggtctcaataggaatcaaatttgccgacaccttgatcttggacttctcagcctccagaagcataagaaaataaactctcgttgtttaaaccacccaatccatgacattttattatggcagccaaggagataaaagacaggcacaaatcccactgttgggctacaactgccatggagggtagtgctatctgtctacacaacacccactgcccatgacctccgtctatggaagccaacgttgttcaggcacacaacactttgacagccatgggacacggcaaaggtgtgctgcttcctccagaaggcattttctttctttctttctttctttttttgaaacagagtctcactctgttgcccaggctggagtgcagtgctcggctcactgcaacctctgcctcccaggttcaagggattctcgtgcctcagccacccgagtagcagggattacaggcatgcaaaaccatgcctggctagtttttgtatttttaatagagactgggattcacaatattggtcaggctggtctcgagtgcctggcctcaagtgatcctcctgcctcagtctcccaaggtgctactgcacccggccccaggaggcattttctaacaaatctaaatcattgcttctcaaacacctcgtgctttcagaaccacttggggatgcgtgattccaacctcaaaccaaatgaaacaaaatttcttcgtgtgagacctgggcatcagtacttccaaaatgtgccccccaaaattctggtgcccagatggggctgcaaaccactggctgaggctggacatggtggctcatgctgtaatcccagcactataggaggccgaggcaggaggatcacttgaggccaggagttctaaaccagcctggccaacatggtgaaaccccgtctctaccaaaaatataaaaaattagccaggtatggtggtgtgcacctatggtcctagctactcaaggggatgaggttgggaggattgcttgagcctaggaagcagaggctgcagtgagctgagatcatggcactgcacttcagcctgaatgacagagcaagactccatctcaaaaaaaaaggaaaagaaaaaccagtggttgaaataaattggtaatgcaagagtcttcattaggcaggtgaccaaagctggattctcattgtgaaaagaaagcatttattccaaggtgggaggatggattgaacatgggggcctgctgccccagtcaaggctgcagcacccagcatccctatgaggagccagcctgaggacaatcagaagcctgaaccaagaagaaggaacagagaaccaagacatccttgatggcgtcactgggctgcggcaccgaacaagcctggagccaaccacacctcaggcttctcatcaggcgagttagtgaatttccttccaggtgaagccagtttgatctggttttctgttatatgcagccaaatgctttccactagatgtggtgagtaaaagacaggaggattctgtatagaagaccaatgactgaggtacaaggatccacagaaacatcgactggcagattctgaaccatagcccaggattccttcagacatgtcacagtaaggtccaccaatgtgtgctacatgcctggctttgagttctgggacagggctgtgggaaaggtgaatcagatgatcctttggctctcccaagagctgagctccctgtcacttttcacacgctggttcctccacctggaacactgttaccctcttccacctccttctatccagctaactcctactcagctttcaggtctcagctccactgtcacttcctgagatgccctctttggaactcccacaataggttatgacatcctgcttatttattcctaaattcccctcatttttctttctagaacttatttcagttgtcatctatggattgatgtccaccttcccaactgaactcagagtgtgccatcaattctaataacttctttatcctgacccacttttgttaaatattgtattctaaaagggaaccttgttttgctctggtaagtgagaaagtcaatttcccttcctacaaatagaagtctgcaatcacaacacaacaaaatcaaaacaatgccactaagtcccaggaaacccttgtatgtttcttagggctaagttggaggttgtcccctctgttaaaaaaaagaaatgaactgcactgggggagtgaaaggaaaatgaaagactcagcgctgatctgagacttttctttttttttgagccggagtcttgctcagtcacccaggctagaatgcactggcgcaatgttggctcactgcaacctccgcctcccaggttcaagcgattctcctgcttcaaactcctgagtagctgggattacaggcgcgcaccactgcgcccagctaatttttgtatttttagtacagacggggtttcaccatcttggccaggttggtattgaactcctgacctcgtgatccacccgcctcggcctcccaaagtgctgggattacaggcgtgagccaccacacccagctgatgagacttttatgacaagaattagcgtgctggacagagaaagtaaaaggaatggctttatcagggtatcaaaccatgccatttgaggacattcctgtgtaccctctaaaaacacctcctggatcaacagagcatggatatcaagcatcagaaaacaactaatgaccatgcaggcacccagatgcctttttacagagattgtattgcttaggaagatatccgaggggcactgaggacaaatgtcttctggggggctgcctgactcacccctttctctaagaacagcccatcacccatggcccctgcttaatagggctgtggccacagctgaccccaccaggatggccaatcagcttccttcttatgcaatcttgattaaggacctcagaatgggctgagcactggagtgagggtttgtgttaaaaggacattttctaccccgacaatctctgatgcagacaaagggagaccagtcaggaagaggtgggaacagaaaggtctgtcaagagaaaggtgggcagttccagtgacctttttgcctggccaagaatcagggttagggtcctcctcagggatgagaggtgagtcattacctagtgaaaccagaagcccacaggtctccagcatcacctctcggtacagggtcctctgggccaggtccagctgtctccactcctcccgggtaaaggtcacagccacatccttgaaggtcaccaacatctggaaagtcaaacagaagtaatgctattggccttgtgttgtcgcataggatcagaacctgtcactcagtctctagtcaatgtgcagagagatccaggtctgaatcaactaggtctcctttgggctgacttccgtgcagggctcaaaggggaggcagatactgccttttgacaatgcaattgtgcctgagagaaaagccttctatggggaagctgttgaagatgacacaaacaatggcaatcccacgaggactatgggaagcagagagtaagtactctggcatattaaaagaatggaggaaaatgactgatactaatccaaccacaataacagcaacagcagcagctaagtgtgggggaaagaaaaatagatcagaccgttactgtgtctatgtagaaaaaggaagacataagaaactccattttgatctgtactaagaaaaattcttctgccttgagatgctgttaatctgtaaccctagccccaaccctgtgctcacagaaacatgtgctgtattgactcaaggtttaatggagttagggctgtgcaggatgtgccttggtaaacatgtgtttgcaggcagtatgcttggtaaaagtcatcgccattctcccgtctcgggtacccagggacacaatgcactgcggaaggccacagggacctctgcccgagaaagcctgggtattgtccaaggtttccccccactgagacagcctgagatgtggcctcgtgggaagggaaagaccttaccttccctcagcccgacacccataaagggtctgtgctgacgaggattcatgaaagaggaaggcctctttgcagttgagataagaggaaggcatctgtctcctgcttgtccctgggaatggaatgtcttggtgtaaaacccgagcgtacattctatttactgagataggagaaagccgccttatggctggaggtaagacatgctggcggcaatactgctctttactgcactgagatgtttgggtaaagtcaaacataaatctggcctacgtgcacatcgaggcacagcacctttccttaaacttatttatgacacagagtcctttgctcacatgttttcctgctgaccctctccccactcattaccctatagtcctgccacatccccctcatggagatggtagagatagtgatcaataaatactgagagaactcagagactggtgctggtgtgggtcctccatatgctgagtgccagtcccctgggcccacttttcttcctctatactttgtctctgtgtcttatttcttttctcagtctctcatctccaccttgcaagaaatacccacaggtgtagaggggcaggcacccttcactaagtcctctggtcctcactgtgtccctgccaggctaaggcttccttagccgtggtaaagcaaataaaggcctgacttaaatcaggcctcctgaatctgacacttgccagctatgtgactatgacgatgtcacatgatctctctaaggctcgatttccgaatcaacacaataactattcccatctcagcaggcagctctaagaactaaacagaaaatgttcacttaggcaatcagtggagtgcctagcacatgtaagtgcctgatgtgtttgggaactttattaatcccctgacaggcccagaggtaaatgtcgttatcacttccatttcacagtcagcaaaggctcagggagctttagaaatcaggcacagcctcacatttaaaaagcaaaagcagcatttgagcaccgctaaaacacctcaccaagctgccagagagcaggcaggtgggagtgaggggtgcttttagctacagccagcactgccaggatgggtgtggaactgcagccccgcagagacctgagaacaatgtctcagacaaagggaagtgcaagggcaaaggctgaaaatgggaaagagcttggcaagctcaggattccctggatgaatgcagtgagaaaggggacaatggaagaggagaaagaagatgcggtcaaaagggcaaaccaagtacagccttgcagaccatgctggtaggagggggtggatttattggaaatgtgatgagagtccctataagagaggcctattcaatcatcaaccatttattaagtacaataaatgtacttaagcctggctgttctgggtcttgggagagggaagcaacaggcactcacattccagggttggaaaaagatcctaaacaggcaactaaataaatgagtaaggcaatgtcagatggccttaaagattcagatgacaagaaaacagagcaaggagaccaaagagactctggtcagctttaaacggtgcaacagacgagacctctttaagcagcggacaccagagggagtcagaaataaagcaaaggagggagaggtggatgagaaattaacaactacgacaggagctgacagtaatctgggctatcatgaaagtaatcagagtgactgctagagagtaaccctgggcctcatgtgttatctccaaagggacactacatcctgcataccatcgccactgaacattttaatggactcgtttttcacctgtaactaaatgtcttaaacaggaaaatatactgttagttgcaacccagcgtcccttgccctaaactgaaagacaaattcctcagcctgccctaccaccttttctgccctggcatagcagcaaccgcagaaacgctcctcccacctctttcagccgctgcccttcgtgttgtagagacaggaggccaaggaggccagagggtcagactcctgctggggttgagtctccaaacctagcacaggcccagggagcagctccggaaacaacatcctgagcgacgtccccggaccgtgctgtgcactgagacggacacacacacatcacccagggagccgttcaagcttcctcaaccccgggggggggaagagtaaatatttctactttgcgcgcgcaaaaatgaaggacgaggacagtaacgggacttgttcaaggtcgcaggcccgagaaaggacatggttggaagagccacgaggaggactgcggtcgctcctctcacctgtgaggggttccgggaccctaaaagccctatttcataccacaacgccgcgcaccccagaaacggggacgctccccacgccaccgcgggcctgcattccggacccgggaccgcgcgacccccttctaggcctctaagaagcaacggcagggactgcactgaggacgaccctgaaacgccgtccttccgctcgtcgggcccgggacactgaggccgggtggccgcggggagccgagccagtctgctcacctgcgctgcgtccttcgtctccgccatccgaccgttggcaggacgaggccgcgtggggcagctcccacgggctcaaaaccctaccccgggtcctacaacggtgcggaggtgagccccagtcgccctaccatccttcccagcacagttctgagagcgcggaccaacacgccccaccacaaacgtccacgccagcgaggccggaagtcccgcccctgtgtcgcggtcgcctgccacgccttttcctgcgccggcccactgccttctaggtaatgtagtcttgtcccgtaagaggccaggcttggctctttttccttttttattatgcacaccatgtttctgtatatctcagatgatcttagcggagcaagtgtacacactggattgtaaatttttaaaacttcctattattcggatgcctcaacgtccctacaagcaggctgtgagcactcgcccaggcacccaggtaaacgagtttgataaagggggccctgccacgaggttccccgcttgcctcctctgagtgacccagtgacattcccatgtaccagtaaaatcttacgcctggttactgcgtcctcctccaccctgacgccaggcactgtccctgggactggcgtggatctggacccccgcttcccgcgtggagccattcccgggacatgctcgtggggttccgtctgtgggacgtctgcctcctctgtgtggactggtgttgcccagggctcaggaaggtctccaggggccgtgagtccccgcccgcttccggagtccagcttcgtgacaccatcgtgagaaagaatgcagggatgagtcaaaatgaagccaaaggcaagaagcttttattgggaagaaaaagtacacatttttgagaagagtgtacttttcccaagagaagagggaaatgcggacgtacgagggagagcgggtcatgcacaatggagtttgggtttctaattttatgggctcttctaattagggggtgggataatcatgaggtttttctaggaaaaggtgggaatttcttagaattggggtgccaaccatttttatactaaatgtgggcgtgcttggattggcctggcactggtgggtgtgtgatttaatgtggcaatgagtgtataattaggtctggggtaggaaatgggtcaaatctagcgtcatgggacagcctagccccaatcctgtttgttaaggtctcatcagcccagtcttcttgttggagtagctaattttaacagcttgatgttttcccccttctcctgtgaccacacagcattcctattttgtgggtgtttctttaattagagagtggaataattattaggtattctggaaaaggagggaaattcagggacccacctggttactgccccctttctctcttatttggctttgcccagaagagtcatggacatgtcatcctgactgggattttggccattctttctcttattttgggttttctgttatcctatggtttctttgcctagttcttgtttttatttgttgttcgaatttttccatcctcctgcaaccacccagtgctattcctatatcactgtgagtataaacaccctttaaccttataggcttcttgaagtataattcccaagaccatgttgcagtggtccttaaagaaccaataaggcagagagaaacaaacatgttccaaattttgttctcaggagtaaaccttactcaattgttaaaggctgtagctagctcaaaagaagtttccttgactctgaaaaacaaaacaaggatcagcaatgttccaagcaaaagtcaaaaagattatttcagtttttctattagttcagcctattctgttaactcttgttctgcttgatatttataaacattttagcttttcatgagtcctgtatgtttttcagttatcagaaacctgcatttaggaatacctgttaaagtattcctacatctgattatgaaccatattttgaagaggattaaaacaagacaacaattgtctgtaaatgacaaaatgtccagggtggttagtcaaaaacatgattgacaaaaaaaatttggttatctccgtggtttacaataacaacataacaaccttaattgtggttgatagtgtatactttcacattagagttttctaaatcccatgcagttttggaacacatattaatagtatttgctgaaatataacctgaagaagattagacatcattttggcaatcccatgtaacaaaacatgtcaaataatcctgcttgcctcttttctggatgccccagggaccctctgtagcatccaaaacgtaggtgtcaagaaagacaattgatttgtggaagcctgttaaatatgttaacaggcttaaaatatttgatgttatgtactagaattccagattactataagttatttattttgccaaaatgatgactcaaaaatttgaaaaagcaaaaacctttcattagcctttactattacatgaaaattgtgttcaagagagagaaagccaaatttcacccttacattagtgtactattaatgtcaaccacaatttttaatgaaacaattataggcaattctatccaatcttaaccagtttgacaatgaggtgagattttcacaaaccttttataaccctttacaaattttgctaaagagtagattcatgcattaagagttctttgttgtgcttttatttcaatgctcaatttacagaaaaccacataatacccttttgaatgtagtcaatatattcacacagagtttcctttgcaagattaattcttacaattttttccccagtttgcttaaaccttcagttgtattttatctactttaagacaattctttatccctaggcaaaacgtacattgccatgccttcttataattttttacaaaaaacacattttactgtttttacacacattgcatgtaaatctattcagtagtctcaattacatgtcataatggtaactcttagcaattttttttttaagatggaatcttgctctgtcacccaagctggagtgcagtagcacagtcttggttcaccgcaaccaccacctcccaggttcaagcgattctcctgcctcagcctcccaagtagctgggactacaggcacatgccaccatgccaggctgattttttgtatttttagtagagatggggtttcaccgcattagccaggatggtctcaatctcctgacctcgtgatctgtccgcctcagcttcccaaagtgctaggattacatgtgtgagctaccacgcctggccctacctcttagcaatttttaactttagtgtaaaacctggtaagttgttttaattatttgctgggtgcagataaagtttaactccttccagaataagttaggggcttggttacttccatatgttcccagactttacccattgtgaagcaggcaagttgaacagttcttaaaggccaaaggagcagtacaaccttaaaacatttagcaaacctaccatctgacctgcataatttagaccacatatttacatcttgagtacatttgtattttaccaataatccctaagactgttttatttttaaagattaaagtcacatgaactaagagaaattacagtttttactattctttcaaaaaagatttgatcggccaggcgcagtggctcacacctgtaatcccaacactttgggaggctgaggtgggtggatcataaggtcaggatattgagaccatcttggccaacatggtgaaaccccatctctactaaaatacaaaaaattagccaggcatggtggcacgtgcctgtaatcccagctacttgggaggctgaggcagagcaattgcttaaacctgggaggcggaggttgcagtgagccaagatcgcactactgcactccagcctggtgacagagcaagactcagtctgggaaaaaaagaattttatttgatctaagtgcttataggccaatcaattacagctcttttttatagacatcacacaacacatatatgactacacagacagaagaagatccagcagctcagggtggagccctttaagaataaggctacaaaagcatgcagtttctggggcctaataaacaggcatagctcgaaggccaaaacagattttgagagggatttatccatctctaattcttggggttccatgaggaaaacagatttcccccaaattgaatctgtggcaccttgtctgttttctcaaggagtccaaggccaccagaagtcatccttgagcctttcatgcatgcaccaagattggcaagacagagtggagaaaagtaattcagttgactgagatacaaaccttttccagaaaaacaagatctaagaagagaaaaacataaaggcgtttcaaggacacctataacttgggtatccacttttaattaagctgagtgctctttcataaaattcttctttactaattaaaactttacagataatataaacaatgatccttatcttttttttttttttactggtttgcatcactctttgttcacaatcatgttcaggttctccagtttacttttggggaaagtggctggattcaggcaaggacaggtttttaactggactgtagatccctctaacagcaagccctgatatttgaagaggcaattgtctgttagccagagacttcccttagaggatagcagtcctgctatattatgtggggtctaaacagttattttccggctgggtgcggtggctcatgcctgtaatcccagcactttgggaggctgaggtgggtggatcaaaaggtcaagagatcaagactatcctggtcaacatagtgaaaccccatctctactaaaaatacaaaagttagcagggcatggtggtgcacacctgtagtgccggctactcaggaggctgaggcagaagaattgcttgaacccaggaggcagaggttgcaatgagccgagatcacgccattgcactccagcctggtgacagaacgagactctgtctcaaacaaacaaaaaacaaacaaacagttatttcccattattaacttggtggcctctggcacgagcaaagccaccaatgcaacttcttggaggaaggctggccatcctttaaccaccaagtcaagttccttgcttaggtaacccactggctgttgagctggacctcgagcctttgttaaaattccctgggccgtttcctttctttctgatacatagagattaaatgtgttccctatgagaagactgagggctggtgttttaagtaatgcttgttttaactggttaaggcttttgagttttaagattccaagtattagttgcttgagtttcttttatgaggtggtataaagggtgaggtatttcaccatatccaggtacccacagtctgcaaaattcagtaattcctaagaatccccttaactgttaaaggaaatgggcttaatcctttccttacctggtgctcttgtcccttctgataagactagacctaggtactttactgaagtctgacagagctgagctttagattttgaagtcgtatatcccctttctgccaagaaattgaagagagcctcagtgctttcctgttacttccttggttggagcacagaggagactgtcatttatatacttcaaagtttaaacttgagggtgagaaaaattagaaaaacatttggacagggtctgtttcagcaacttccttctgatatcggggggtgcctgagtaataaacctgctctttattgaattgggagacagggaggtgtgtttcactaaggcctctctcagcctttccataacggctgagggattttcatctgatttttgatttaacatggattgtttagagtaattaagaggtttggttttgttttttgctagccttttaatatgcacatcagaaagtgtattccactcatctatgcgatgactagtctccacttagggttttcaaggggcactgtttatcttcctactgggaatgggaatcctgtctcttttttaccctctttccccttttgactgggtttcttttttgactggctataggatacatgctgtttgtcggtgaatctctctgctgccttagggctgcctgtttctcagcagcagttagagtttggcttaggagtaacataacatctccccatgcaagatcaaacatttgggttagattttagaaagcttttatgtatctatcagggtcatccaaaaacttgcctaagaccccctttgtttgtctaaggtactgcaatgatatgggaacttgaactctagtggcaccatgtccattgggcatttcctgcagggtcaacagtgaagttgagttttcttgtgtggcacagctggaggagctgatgcttggctattggaggccccagataagggatggggaggtagagcatccagaagttgcatttgagggggttttctgactttgcggtgttgtccactgtgggcttgtctgatatgactcttaagagggcagagtcaattttgcagtgcttacaaagagctgggctgtttcacagggcaaagaaggcttgcacataggggacctcagaccgtttgccctcccacgtgcagaaaagatctagttattggatattattgaaattaacacttccctcagcagcccaggcctatccatcctggagctggtaagatggctatgtcctcgtacagaagaatataagccatttttcttcagtctcagggttaaaagtctcagtgtctcaggatgcactcaagaggagtgcagactgaagatggtttgttacctgttttaaaaagagtaggagaaaaggcgtcccttggtctttttcctttttttggtgtgacccagggtggagggaaagatcgaaagtgcatcccacttctctttcttcccatactctgggtcctggccaccatcataggtgtcacccatggatgcaagcatgaccttcacccgtggatctggaagagctagttgggtgtaatagtcatgcttacctgtatgaggacctgactctccacgctgctggtttcctagtcccaagtggcccataaggctcccagggtaccctagtggtctgggagatattgtatttgggtgagaccctttaatggagggagtgttttaatactatctctggcttcccttgctatggccctagcaaaacattgaaatcccagagaatgggaccgattgacttccaaatatgaaatcttctttttatttaaatgccagtgtagttcaatgcagaacaggtgactcaaaagaacataaggattgagtggctgttctcccgactgttaaaggtacagctttgctgttaacagatggagcatggagcttagtccctaacagaggcacacaggagggagaggaattggggaactaatggttttgcacaaagggcagatagggctccttatggagaaaaaatcctatttcacttggtggcgctgtaggatctgaaatgttaaataagaactctgactccaaattctttccaggaagaagttagaaagagaggtttgggcttaataggctgtccccattgtatgccttccagaagaagaaaattaacttgtctcataatggaactgtctagattcattgggcagtcctgagcttttacatggaggaaaaacacaacccaaatggagagggagaagggtattcactcagcatgaaatatcccctctatacagtgccatgaatgtctgtcattagggacaaaaagctctcactaggtgaaagtttagacagaaatcctctaattgttctaattagatcaaacctctatagtaaacagttcaaaaattatagtgtcagggaatcatcttcatggttgctggacttgtcatcaacatccccaggatctagagttccatcttctggcctatctggaaaacctcacagacatctacccagtacttctaactaaccatagcaatcccaaagtaccaaaacccctacttattcagtggaactctccttcacttaatggattccacctgaatgtccccttccacacttgccattatacctggacttgaaaagttgagtatatctccagtgcattaatgattcttttgcactcactactatgttaatgacacaaaagcagacgtttccctgtgatgctctgatctaactatagttaccaagtttccaaggcaacagcaaggtaaatggtatttcacttgtaggcaagaagaccatatatgatgtcttctcccagaccagaacacacgggaaaaaatgactgcctaatctgggagggtgggagtactattcgcttctggaaaacaaggtttgtttgaccacccccattggaacaggggaagaatatctctatagacccaacttggcagcaaaggatagacattacaccctgtaggacctctatgctccaactggactcatttttgtttgtggccatgaatgagaagtcacatgctgtaactactcctggctccccagggagccatctgttcttttaggagtagctttcccttatatatcaaaaacttggaacaaagataaatgtatgttgaccacccttgcccctccaagggtcacagtctataacccaataaggcccaggaacaccagaagtcaacaagcaataggattaattctggtgggaatcagggcagccataggacaagcagcaccctagggtggctttgcctaccacaagtcaaccctaaagaacttgactcaaactctagaatccttagccaccaacacaggttaggcactaccagcaattcaagaatctctagactctttggcaaatgcagttctcaataacacactggcattagattatctactagcggaacaaggtaaagtctgtgcagttaataaaacctgctgcacatatattagcaactctggataggttaacattcaaaagatctataagcaagtgaccctgttatgtatattttctttggctcttgcttgtttaacctcttagtaaagtttgtgttttctagatcaatagtccccaacctttttggcatcagggaccagtttcatggaagacaatttttctatggatggggtatgtggggctggggctgggggctggtctcaggatgaaactcttccacctcagatcatcaggtactagattttcataaggagtgtgcaaccccagtcccttgcatgcacagtttatgataaggttagcacccctatgagaatctaatgctgccactgatctggcaggaggtggagctcaggcagtaatgctcactcacctgccactcacctcctactgtgcagcccagttcctaacaggacatggaccagtatccacaggagaggggttggggtatcctgttctagttccaggtaaagacaatgctggcacaaggcttccaacccatccttgtctactattccagagaatggaagtgtccttcctttggggaccttatatgtggtatccagggatgtttactcctttagtgctaggcagggcctaggcccacaaaatcagcagcaagcagtcacagagcccccttaagattaaagaggagtatctaatctctgatgggagagtgagataggaggcaggactccataccagactgaagactggctgaaacagggaacaggcaccaagagcatatctacataatacacacccaccagtgccatggcagtttaccatcaccatgacaacacccggaaattaccatcccttttctagaaatttccaaataacccaccctttgcatgtagttaaaagcgggtataaatatgattgcagagctgccccctgagctgatactcgacacactgcctatggggttgccctgctctgtaggagcagccacagagttgtaaccctgctgcctcaacaaagctattttccatctaccactagcttgctcttgaattctttcctgagtgaagccaagaaccttcttggactaagccccaattttggggctcacctgccctacaacgccacctgatgtcctacctctgtgctttctaaaaccatctcccttaccactggaagaatataacttaggcctcaggaaatgaggataattcatgctgacataaggagctctttaaaaaataaaaaagcagctgggcgcagtggctcatgcgtgtaatcccagcactttgggaggccgaggcagctggatcacctgaggtcaggagtttgagacaagcctggccaacgtggtgaaacctcatctctactaaaaatacaaaaattagccgggtgtggtggcacacgcctataatcccagctactcaggagactgaggcaggagaatcgtttgaacctgggaggtggagtttgtagtgagccaagatcatgccactgcactccagcctgggcgagagtgagactccatcaaaaaaaaaaagaggcagcattatataataagatacctgggggatattgatggacatgctaccttggagtcctgcctagctcagccccttcttcgagaataatccactacccacagtcctgttaaccaatctctggggatacctgacccaaccaggctagatcaagttttcttgcctgaattctggaataaggacctcagacagagggcagagtgtgctgggcactagggtgaggatttgtgtttaaagggctgtttctaccccagtgatccccagtgcagacacagggagaccaggcaaaagcatgtgagaccaaaacagagaatacaacaggacctgtgggtagagggagaagggcttgagatgcctttctcaccaggcagtatgtgcaagaggatggaatcagaggactagggtcacccacatgggacagaaataaagctttacccagcaagaccaagagcccacagttctgcagcctcacatcttggtgcagtgtcctctgggccaggcccaaatatccacatttctaccagatgaaggtcagggccatgaccttgaaaggcaccaatgcctggcaagtcaaacagaaagttgacctcagactgttagatattagaacctattgcttggtcactgggaaaggcacagagaaccaggacatctgagggttgagctccatgtagggcacaagggtgagggacactgcctctgaaaatagggtaactgtggcagaggataaagcctatgatgggggatgtcatttccaagttaaggtttctgctacccaggctccttctgattctctacctcccacatgtcctcctgcactcacattaaatcatcccaagtaatcctccaggttgcttgcctggctccatgctctgacaatcatgctgcagaatggagctgttccctctaagccaggctatgcctacactgtcacaccttgtacaaggagattgtgtgtgttgtaaaaatagacacagccagttactagatgtgtagatgcacttttaccacaggcacatttgttttgctattacctcctccactttctattaatcatacccaaaatttctgtaccaattatgtcccatgcttagctcccatcagcttgagtaccaccatctatggaatcatgggcatcagggcacataggttcctttgcagaagctgggaaaaagcttcgtctcaacagtgctgggcattacagcctgtagaacaatgcaataaatccatcttattccctaaagcacaggagcctgtcataacagccgacttgtcctcaggatgacctctggtccagagaaagtgtagggatccaggccataaattaggacaacaaaattcttgcattgtttcctaggaggccttgagcagcaaggcaaagtggactaaaaccagaacaagaactactgtcattttacttttcctgcacaggccagcaacattggggccccacaaaagctgtccatgcctttatgtaggagcccaaatgtgttttccagccacctcacacagtaaaccaaaccctaagaccacacatagatttaaaaataaggcctttattaccacacaaaccagagcaatgtgaggcagccagttactaggtggtgacttggaggctggaaaaactaccaagtgttgtgtgaaaacaagaatttccatgaagggaagccttccacatcagcttccagcagaacccaggctgggcccttctggccaaaactggtcagatgtatgctgtaatcagtcagaaaagggaaggaattccccttaaaggctcagactgctcaaggaatttcctccaagggttgggagaacacaggtgtatctgcctcgccttagtatgcaagggtgactaatgatttaactctggcaaaggcctccagcagtttagaacatgcaaaggagctcctgcaagacacatatgcctggaactaatgggagtctgacccatcgggaggtctagaagtatgaggtttaactttaggcagacggctccttcacaaaggctctctatagccataacactgaagaaagacatggcacattccctgcaggtctaaggcttttctcaggtttggagtttcaagagttaaacaatgttagatcttgggctgtagggttttccacatttgctgctgtcacgaggcctctccacagtgtgagattttcggtggagaatgaggccagagtgttgtgtaaaggacttcccacatttgccacactcatatggcctttctcctgtgtgaaccacttggtgttgaatgaggctagacttttggataaaggatttcccgcactgtccacagtcgtaaggccttaatccagtgtgaattttctggtgttcaacgagggtatagctttgtctaaaaaatttcccacattcactgcactcaaaaggcctttctccagtgtgagttctctggtgcctaacaagtttagatttgaacataaaagctttcccacattccccacatacataaggcctttctgcagtgtgaactttgtggtgtttattgagggtggttctttggctaaaggattttccgcactcatcacactcaaagggcctagctccactgtgaattaactggtgctgaatgaggccacactttaggctaaatgatttcccacactggccacactcataaggccttgctgtagtgtgaattctctggtgtacaacaaggctgaagctttgtctgaataatttcccacattcaccacactcatatggcttttctcctgtgtgagttctctggtgtcgaacaagagtggatttggacccaaaggcttttccacattcatcacactcataaggcctttctccagtgtgaattctgcaatgttcaataaggttggaactttggctaaaagatttcccacattcaccacactcgtaaggcctttctccagtgtgaactctgtgatgtttaatgagggtggctctttggctaaatgatttcccacactgaccacacacataaggcctttctccagtgtggattctccgatgatcattcagatgagaggtttggctaaaagatttcccacattcactgcactcataaggcctttctccagggtggactctttgcagctgaacaagggagcactcacagcagcaggctttcccacatttgctagattcataaagcctttttccagtgcagactctagggtgaaaaaaagtgtgtttgtggctggactctctcctgcattgactccacttgtaatgacttattccaacatgaaaggcctcctcacatttgctgattttgtttggcttctcatagttagcaatagcttgcggctgaagaatgcccaatggggctaggaagtccttcccaacctcactgctggtgaaaggcattcctgactcatggaacaggcagcactgcacaaatgaggccttgtccatgtcactttccaagggtttctctgcactatgatgcttctggtcctggtgaaagaccgcacatgccccagtcaagtatagttcctgcccaggcaaatcggtcaggtgcaaaatgtcggtcaggaatgggacacacatgtcacaggattgaatcttctgggtggatggactggcctctggagtcctgacctgaggtactccttctacagaaacactttgctcaggtgtctcttcatcctccatcccatgccaacaaactgaaagcagagaaacactgatgaaatgcacgttgactatgatgggagtgtattagtcatttaaaaaactattttctgaataattggtgttctgacatcttaaaaactttgctggcctgagctcaggagtttgagaccagtctgggcaatatggtgaaaccctggctctactaaaaatacaaaaaattatccaggcgtggtggtgggtgctactcaagaggctgaggcacaagaattgcttgaatccgggaggcagaggttgcagtgagcccagatcgcaccactgcactccagcctgggagacaaagcgaaactgtctcaaaaacaaaacaaaacaaaacaaaataaaaaacattgctggctggggagagaatggtgcttccagagtgagccaactcttaaagagatagcaaagggctcagcaaggagcataacaaatacaccatcaatccagagcccatactcccaatcacattttctatgtgacttggatgcttcaggagctaatattcctctgctctagtcatcccaaggtcaggcaggagacaactacgcctagtgagcccctttgccccaaagcaaactactcaaattacccaatcctaaactgtttattatgtcttgtgttacctgcagaaaccccaataaaggctgtggcttaatattttccctcctctcttgcttctaccttctgaccactgagcacttcctcatgtggccctgcatggcatggtgttcacatgctcttgctactgcaggtgataaattcctatgtcactgacattaacctctctgtattggcactctactacctccattaattaaaatcctgtgggtacataacaggaaatgggaagcaccttcacatatacatcaaggaatgaattcacagtattgctttgaagcaatattgaggaactgaaagcaggataagaaagaggctgcttggcagtagtgggcctctaaagatcacaaaatggggaggcctcaccaaacacaggacgtaagaatggggtacagtacacaaggagaggcagggtctccaatctattcttttgccaaatcctgtggcaagatcttgtcagctggtggcacgtgtatgctgtgctgaaagctggcattattcgggcccaagataatgcaattggaagtgagtgggagattccaattgcgatcttgtgttcaagaaatatttaattggcatgtgcacaactcacaacatatcgtgagtgggtcagtgttggaaaacatgctggggggcagtgcagagaaactggtgacacatggagggcaggaagatgggggcagcacgaggccggatgtcccagatgaagcaataagccagcaaagtgtcaaggaagaggaagaaaacatagaaatgagatgtgtccagtggcattagcaccaaactctggatgacacagggcaaattcctggtaagattagaaaacaggctggatgccatgtcctcacccaggtgccactgactgaggccaggcttcctctgaagccatattcccatcttcaccctttccaacaaccagggctttcccaccacctctagatgtgccactacttgggacctgaatgaagcaagtcctaagggaaagctgggacaggtgagtatcctgcagtggcccagagcaagtcagcagccttgagaacacaagaaagaaaattaatatcacacagatccttgaaggaggttctggcaaccacagctcatggtccatgtaaatactgatgaggaaaattctgcaaattcctaacacaggtagtcaaaggaaatgtcatctaggaggcagaatttgagacacaaagtaccatgaatatggacacagccacccaaagaggaagtgaagaagtaaacggagatgcattaggctgactcaagacacctaacagccagacccatccctgtgcattttgggacagcaaatgtcagggctgattaaggagtgcaatgatttcattccttacaccacagcacatacgccaagacagtggggaagtcagcaaagcccacggtccggcagagctgcctctgaggaaaaagaggatagacgaagaccaggacacgagagtgggtgtgagggccttacccagcgcagttataagtgcaaagttctccagcatcacatcgcggtacaggagcctctgagcctcatcaaggagcccccattcttcctgggagaagtaaatggccacgtcctcaaaggtcacacagccctgccatgatggggatagatctttccatgatcagattctctcctaggaccccaagttcatgccccccacacatcctttccctgcttatccccatacctaagccccacctcagaggagataccaagacctggtggcactgattcctgccctctcctcatggtcccatcatcactgtgtcttcccacagcaccaacaggcaggtgggccaggaaatgccattttaaactctgggtctagcatatagggctggattttgtcttgtcagacagttctcctggggtttccaaaattatgccactcacatacaaacaatgatgaggtttgccatcattcttatatcctcaatgccatggccatgggttgttcagttcacacttcctctccatatgcacatcactctttgaagcacacactctctcaaacaatctcactcccacggctatttccaccctgttgccccacaccataggcatctctctggcatccccacgatagttggaatgcaacattcagaaagtgcttggcaaactgaaatgaggtccggtgccactcaggctgaatggtccccactgccaaaggcagcccttcagagaccctgctctgaaggcctccctgcctgactctgtccctttctacatcctcagtcacccagaaatacctggggatctgacaccgatggccctcttgcactagcgctgcacttgatgtcctctcttaagtcacagccttcctctcctgctaaccctcattcaaagtctgccccaggggacccccacacctcaggcccaataactcccagatgaccacctgtgcccctcaacttatccacctccctgaaattcctgacacctcaagggttgccacaaaaccctggtagatatatccagagtgctgagtaagcactagttctggtctcagtgtcatcttgtctcaattacttccaagcattgatctcatgcccactcttctcctagatccttggccacttgccagatcatccttgctctcacaccctaccatagccacctctctcccatacctgtctttgtgattcccaccatgaccaaccatgtccccaagcaggagagccagtagtgacccccaaccttccttccctgggctggtaatagcattaccaaagtgatcacgattccacctcctaattgtgtcccaagctatacccctaggcaagtagtggccaccaccttttaaatgtctctatcctgaatccctcaacacagttctagtcctgtaggataaactatccacttcatgtctaaactaactgttctttgaaacatctcagactctaaaagatgtcccattgggccatgttcagatgatttttattaaaaaattttaaaaataaagatggtccatatcaaaatttctgattatctctagagataactgactctactaccaactttacaatcctcgctagtggagcttccatatttccagctgctaaacccaaacaccttgcttttacccctaaatcctacttttctatctcaaaatccaggcttccctacttaaaaaaactgatctaaaatccaactaccacctccacagccaccacacaagtccagccaccagtaacactcacctggactactgcagcagccttcttcactatcttcctatctcatacctcacactcagcctgttctctcagcttggccacacacagggaacctgatgagacctggatcagatcacatacctcctctgcccccaaactgtcattgctcatcacacactccagaagaaacacccgacaactgacagccattttttgtctgattcctgcatcccagctttcagttcccatgagaaagaaaacagctgtagtttcctaaaccagctcagcctgaccttcaagcacttgctcatctggtatctaagcctgagacaacgttccacaccttactttactggttcccagcaataggaaccattctataccagcttccagcctggatgtatgaccctgggactgatgtttgttcaggattcctagaaccaaggacccaaagagtgccaagagaagagtcccagaacacaatctcagagacaaacactggggtcagcatcagtgagggcccgaaacactctccactcacctgtgtaaagcccataagtttagcttctgcagtcacgggaacctgcgggaagaggaaggctatgagaggcaggtaactatggtggaagctccatgggctgatgcctccttgtttccctgcgcagccctggagccaggtgacttggtgatgactaaattattattgctcctcagttccgtgtgactcttacctgctgtgggaccttgcacaaggactcaacttccctgtgcctcggtgttatcccccttccaggctgttccaactctgagtaactttagaaaaaatttgaaaagtctaactcagaccatgtgcctcgtctgttcacaaccacccatggctctcagcgtcttgaaaagaaagagcctcattttaccattcgggcgtgaacgttactggctcaatcgtcccagcaagattcacagaaaccggcccctccgcctgccacaccctccacagcccacgacaccaggcttgtaaatgggagccccacccgcgagggcctcatagtcctggactctagggtcgggctgcagggacgcaagcaggcgcccctcatgcagggtgttggatttccggcggagagggcaggtgaggcccgggagacgcagcactcaccgaagtcgaatccctaagcacggccgccgccatcggattgtgagcggagcggggccgggagcggcgggcgacccggggcgggaacccaggcacggctgccaccagcgccagcgacccaccggctgatgcgcagcggggcgacccccgctctgtgccggaggcagcgtttctaactcaggcggcgtgggccgaggtagagaaccaccaaaattaccatctcggagcggtgccggaagtcccgccttaccgtatgcaacaaacggagacaggtccgttcctgaacgttgattggctccgcgtctttgcagcttggcgctcggcattatgggtaatgtagttctcagaagcccagggttccggtgccctccctgagattcacccggaacaagggctaagcggcccgcggagggcgctaggaaaaggcgcgacaccaagagcgagacagggacttgctgctccttaaaggggccgctggccgatttccgcagtcccatacccactgaagggagtgtctgggttaagataagaggttgtagagaccaaggttcttattaagcagatgaagctttcacgcagcaggcttcagagggaatagattgtaaatgtttcctatcagactttgaaaggtgccagactcttaattctttcctggaccatgaaaataaaaaaaccctggagaggaaaggggattctcagcaaaatgcagattccacaagacacacctttgcagggcctcttcaaaatatgtcaaataaataaagtttagagtaaaatacttcaattcctttcagggcctgctatctgtcatgtaatgctatactacaatcaggctggaattcactgtcttattgctacaagaagtcttaaaatctctgttttaatgttaatgctggtcagttgtgcctgaattccaaggggaggagggcaagtctgaccctcacttcccatcacgtcctgaactagtttttcagattaactttggaatgcccttggccaagaggaaggatgcattcagatggttggggggctgggaattttatttttggtttacacttctcatgcctcttggaatctctgaaccacatacaacggccatttgttgagtaaaagcttccaatgcaggaaactgtctctttcagcctcatgctatacaccattaaaacagtaattactggcaataagactgggctttcttaaacatacaggatctcacagaccataagcctatgatccttcataccagctgcccataatacttttggttttggaagcagcaccccataacctcagcatggctaccaaggcctccttaagacagggtagaatgaataagatctagtatttgatagcacagtagagagactacagtcaacagtaatttattgtacattaaaaacaactaaaagagtattataactagaatgtttgtaacacaaagaaatgataaatgcttgtgtaccctgatatgattattacacattgtatgcctgtatcacaatatctcacgtatcccataaatatacatacatactatgtactcataaaactaaaaattttaaaagacagataaatggcaagcaggtagatgaaaacatgcttaacatcattgatcactataaaaatgcaaatcaaaactacaatgagatatcatctcactctagttaaaatgacttttatgcaaaagacagggaataatgaatgctggccaggacagagaggaaagggaaacttcatacgctgttggtgggagtgtaaattagtaaagccactatggggaacagtttggaggttccccacagaagtaaaaatagaattaccatatgatacagtttacaccacccagaaaagaaatcagtatatctaatagagatctgcactcccatgtttattgcatcactattcacaacagccaagatttggaagctacctaactgtccatagataaatggataaagaaaatgtgatgcatatacacaatggagtagtatttagccataaaaaaagaatgagatcccatcaattgcaagaagacgggtgaaattggaggaaattatgttaagtaaaataagccaggcacagaaagacaaacttcacatgttctcacttatttgtgggagctaaaaatttaaacaattgaactcccggagattaagcttagaaggatggctaccagaggctgagaaggatagcagaaatggaagggaaagtggggatagttaatgggtgcaaaaatatagtcagatagaaggaataaggcatagtatttgatagcacaacaaggtgactacagtcaacaacaatctattgtagaattaaacataactcaccgggcatggtggctcacgcctgtaatcccagcactttgggaggccgaggcgggcagatcacaaggtcaggagatcgagaccatcctgactaacacggtgaaaccccatctctaaaatcaaatctctataataaatctctaaaaatacaaaaaattagccgggcgtggtggtggtcacctgtagtcccagctactaaggaggctgaggcaggagaatggcgttaacccgggaggcgttgcttgcagagagctgagatcgcgccactgcactccagcctgggcaacagagcaagacttcgtctcaaaaaaaaaaaaaaaaaaaaagaattaaacgtgactaagagtataactggaatgcttataacacaaagaaatgataaatgcttgaggtgatgaataccatttatcccaatgtgattattacacactgtgtgcctgtatcaaactacaccatataactcataaatatatacacctactatgtacccctaaagactaaagataagaaatcaaaaaaataaagacaggatggagctaaacctgggccctctggaatgttctacctgcagatggagctggcctccactatcttcagtcccttgctagatgtcatggtccttgaggtcaacactccccacacctgcggaatcccttgggattaactgggtgaacagtaatcgaagttagtggactatatgaatgacgctgccaagctatacttgaatagctgtgccaaatagacaaacacagaaagaaaacacaaaacaacccatccacatcctaagggcttcacactttcttgcactctatcttcaatgttttttcagctttctctttaggtacttattgactgttggtctcacataagtttagccatagatggaatttattactgctttgtgaccactggcagcctccctcatctctggctgggcttctccctgaaggactgggcctcaggagtaggtgggtcatttgtcccctgggcatgccacacagagcaggttttccgaactaggctatccctcctccccaagttatccaggcaattccgctagttctatgcctagatggacacacatgcttgaagtttggggagccatgtttgatgtgatgtggcaactctgaaaggacagtgagggtgagggcaggtgttaggtggccattgtgggggctgctggcctctgggaccagagggtaatgaggtgcacaaccgtgtcacctagagggtgccagtgttaataaggaaaagggttgctgtccgacgcacacagaagccaatgccatggcaccaggtttttgagaaaagcaaacctttattgcaagtcgacaaacaagaagacaggagtccagctcaaatctgtctccccaatatggggtttggggcagcttttaaggattaggaaggacaggttggtaagcactggaagggtggattttgattggaaggacttcaaacaaatctattgatggcaaggcggggatggggttgttatcacccaacattcagagacaacagaccccttgctttcggaagtgtttcagcacttgggttccagccatagcctgatattttggtttcctgtggtgacagggtggagtctggtaggtgagacttcagctccgagtgttgggtcaatgttttcttttctcttttctttttatttatttatttatttacttatttatttattgagacagggtctggctccgttgcccaggctggagtgcagtggcataatcataactcactgtaaccgtgatctcctgggctcaagcgatactcccacctcagcatcctgagtagctaggattacaggtgcaccaccatactcgggtaattttttagtttttgtagagacggggtctggctatgttgcccaagtggtccttccacctcagcctcccaatgtgcttggattacaggtgtgagccaccgcgctgggcctgacattttcttttctgcacattctctagctgtgtaacttgcaactctttagctctgtgcctgcaaaataactggacattatgttaccaacagaggatggccagatgagactggtccagtggttaaacctgcaccttcatggaggccattatgagtatccctacaggccgagtctcagggtgcccccagaagcccataccagccgctgtaaggcagagcatggacttcccctcggggactaaatcccattcttgggctccagaggccttgttcctaccactgtacgccaccgcttggggtgccctgggaacccgcctacctccctactgccctgagggcggttggagatggtcccagcaggtgtgggagatgaggtaggagacgtcttcaacggggtccaaggctcatctggacccagttctcagccgaggggcggtggagagggcgtcagaaaacgcaggaacggctcctagacccaggaggggactcagggaagcagaggcgctttcctcggcggctctggggccttcccagctcgcccggcccccctggaggagacgtcccccggggtggagctacggagaaccccttcccatgggacgtctcggccccgcctcccgcctctgggtacagtcaaagggctcaggtcagagcaggagcagccgggggcgcggcccccacgtggcctcccgggacacgtgcccacagcgcgacacctaagtcgctcctttcacagaatagccttggccccggcacggcctcgaacgccttgaccccgcaagggaggggcacgaggctcctttgctcccgcaggagcgtcgaatacgtatggaatacgcgtcggtgtggatctggcctcagcttcctgagcctgaatcaatgcttctaatcacgtgggcgctcagccgcgacgggaccacagaaatcgaccagcggcctgtttaaggagcgacaaggcccagccctctcctgcattgtggcgacgccatttccctgcgcccccagcgcggccgcttggcttttgtttgaggtgacgctgggcggcagcatccttccctcagccctggggaccagcggggactacagaacccagaaggttttgtctccagccgcagggatgctgagccaatccgcgctgagaaaagggtcgtttccgctttgggaccaatgggtcggggagggacttccggtatcacttcagtggcggtcatttttgcagcgcttgggtgcatccagaccgtcagagctttgggagcgctttgtttggcgacagtcggaaggcgcgaggggaggggtcctcccgctgaacagtgggggttctaagggtcggcggcggcggggttgacggctttgcctaggtccctccgcccgtagctgtcgggtcccggccccgctctgcccacagactccgatggctgcggccgcgctgagggccccgactcaggtgagcgctgcctctactgggcctcaccctccatccccaaattagtgccttcttgggtcactacggtcgagatcctcatgtccagtacagtgggggctcgtgggtggggtccctatttccagaacttgggtgatggggcacggaagagggttacaggcaaagggaccagcgtttctaaactcttggagacacagtgaagaaggttcatacctggagtgccaaggtgaggagttttccctcaattcttaggatgctaggagccgtggagggttgtgtacagaagcggcatatggtctgagttaggtctttcgaagttttccaaaaacctcatggagttagactagaatagaatggaataacacagaggcacagggaggttgagttcttgtgcaaggtcccacagttgctaagagttggcactgaggactggaacgctgaggctcagaaataatgcaggcatcctcagtccacctggctctggcctggacaggaatccagggaagcctgaatccgtagagccctgtatggtcacctgcctttcatgatctttggctttccacaggttactgtgtctccagaaacacatatggacctcacaaaggtgagtggagggtgtcccaggccctcactggtcctggccccatcctggggttttttcatggatctttttgccaccatccagttctttgacctaaggactcttcacaaactggaagcttgacatcctgattctagactggtggttatttgtagacgttcttattgctggcagacaatggaatgaggtgtgaaaggttgccccgcctacgtacaataatgtgtaaggttggcagtgaagctgagctgattcagggaaacacaactctcctttctttctcatgggaactcagagcagcagggcaggactcaggcctggaatggctctgagaaattgggtgttttttctggaggtgatgagaacaatgggaggtttagagaagagaacggaggttatctgacactggtctcatcaggttcactgttaatgcagcatagagaatactctgtgggtgtgatggaggcgatagaaagaccagggaggaggctactgcagtggccaaggtgagttttgatagtggcttcaccagtgtggtggctgtgaaggtagaagaagtggctggattctgggtcagaattttaattaggcctgcttgcattttcagattttgagggtaagagatactggtcaagcattactccaggcattttgaatttagcatctggaaggatggaatctccatcaaatagcatgttataggattgattttatttttattttatttatttatttgtctatttttagacagtctcactctgtcactcaggctggagtgcagtggctcgatcttggctctttgcaacctccacctcccgggttcaagcaatcctcctgcctcagcctcctgagtagttgggactacaggcacatgctaccgtgctaccatgcccagcgaatttttttttttttttttttttgtatctttagtagagacagggtttcaccatgttggccaggctggtctcaaactcctgacctcaggtgatccacctgtcttggcctcccaaagtgctgggattacaggcgtgagccaccatgcccagccaattaattttcattaaggataacaggagttttgtctttagctattatcatagtctgagatattccaaagaatgatatatggagacatcaggtgagtagctgtccatgtacatctagaattctggaagtggtttaagatggagaaatccaaaaggtggtggccagtgtttggcccagagtagctatgggtcacaattaggagtgggtaatcctggtcttgaagataatgctatttataatgcaggaaagggctgggtgtggtggctcacacctgtaatcccagcactttgggcggccgaggcaggcggatcacttgaggtcaggagttctagaccagcttggccaacatggtgaaactccgtctccactaaaaatacaaaaattagccaggcgtggtggcaggcacctgtaatcccagctactagggaggctgaggcaggagaattgcttgagcccaggaggcggaggttgcagtgagccaagatcacgccactgcactccagcctgggtgacagagtgagactccatctcaaaaacaaaacaaaaaaacagaaaagggaaggttggggctatgactgtgtctcatgcttggacacgtggtagaggtggtgagcatcacaaacagttgtgagagaaaagtggtcatgggaagattgtaggaaagaggatgatctggtgtatcagtccattttcacactgctgataaagacagcaagtctctaggaagttccagactttcccatattttcctgtcttcttctgagccctccaaactgttccaacctctgcctgttccccaattccaaaattgcttccacattttcagttatctttacagcacagccccactttactcatactgatttactgtattagtccattttcatgctgctgataaagatgtgctggagactagataatttgtaaggaaaaagaggtttaatggactcatgattccgcgtggctggggaggcctcacaatcatggtggagggtgaaaggcatgtcttgcatggcagcagacaagagagaacttgttcaggggaactccccccttataaaaccatcaaatcttgtgagacttatttactatcatgagaacagcatgggaaaggcctgcccctatggttcgattacctctcaccaggtccctcccatgacatgggaattgtgggaactacaattcaagaagagatttgggtggggacgcagccaaatcatatcatctgataagtggtcaaggcttccaaggcattagggacataagacagacatggagataaagaaataattggtagaagatgacactgaggccaggtacagtggactgtgtccccgcaaaattcatatgcttaaagcctaattccagtgtgatggtatttggaggttgggcctttgggagataattaggtcatgagggtggagccctaatgaatgggattagtgagtgctcttaaacaaagaggccagagagctactatctagtgctctttccaacaagtgaggatacaagaagtcagcagtctgcaacctggaaagagtccctaccagaacctgaccatgctggcactctgatctcaggcttcctgcctgcagatctgtgagaaataaatttctgttgttgataagccacccagtttgtggtattatgctagcaggccaaactgactaaaacactaggactagtgcttattcaccatggtaaaaactcgccaggaatttgttgtgacccttggtgagtctggggagggtgtgagtcaagcagttgaataagtttaggagtacaagtgttcatctgtatgagtcattaggttggaggtagagagccactgagagtctgtgccactgaggccactgattttgaatgagggttaagaggtgagaagaaggttgttgattgaagaggggacatcaagtgcagcacaagtggaggacggccatcggtgtctgacatcaggtgattcttggtggctgaggttgaagcaaggaacagagtcaggaagatagcccttcagagcagggtgggggctgtctatgacagtaggaaccatcagaggtctgtgtagcactggatgatgtctcaatttggcaggcagaggggtggaggtagccgtgggagtgagactgagcgagtatggttcaaagaatgatgtgtacatggagagggagtgtgaactgaaggacccaggcccctggcattgaggacttaagggtcaaaggtgaagccacatttgattgtgtctaggaggcactatctgaaagacccttggggaactgcctgacaagaagggatacactcctacataccgggcccaaagtttagatgtggtgcatcctgcccacctcctggttggtgctgtagaaggatacagtgatcattgggaccatgaaaagagagtgggcatctgtgtcaccagggcctgtatttccttaaggtggggatgattgcgtgggtggatgaacttgtggaggcgttgattgtggagtgacctgtccccatcatgacagggctgtgtgacctttgaggacatcgccatttacttctcacaggacgagtggggacttcttgatgaggctcagagactcctgtaccttgaagtgatgctggagaactttgcccttgtagcctcactgggtaaggccctaataccaactccagtgtcctggtctgtctatggtcttttgctgacttctccactttcttgggatatgtgctatgggatccagcactgtgcactgcctgagtagccctaacacctgctgcccagtggtctgggaacacctgctgcccagtggtctgggaacacctgccactgggcagcaggtgttcttcagtcagccaaatggatctctgttccttgctctcttcttggctgggtgtctgtgttcagatccatgacaccttgtgtcccaagttccctgcacccccatctgctagctgacattttcttgtggctacctgtgtcatgattgtagtcattgtcattgtctatacttatggggacaatgggctcttcttactcactccttctagtttgtttgtttgtttgtttgtttaatgatattaactttcttgcccatgggctgttgtgtgctgagtcgttctgcatcagtgctgatcactcacatgttctgtctttctggtaggacttggcttcatgaaggtcccacatagctagacaactgagggtgtgcagagaaacctggttgctttatagggtgaacatggtctcagagaaggcctgggcttgttgagtggcaactggttgggggcatgatatccgggctgttttccgatcacataaggagcctgtcctgtcttcaccactgtttgggtgcacatgccactggccaaatctcatttctatattttcttctcagtacttgacacttctctctcttattatttttatctatgacttctagcacctggctacctccacctttctgatcttcatgcatcatctgcttctctgcactgctccctctgcaatgttttccaacattgacacacacataatgtctcatgaagtatgtatatatgaccacatgaagatatgtgatcatatcacttgctactcagtttcaattgtattttcctgggcttgggcacagtcaaccttctgcacagcatgcaggtgtcaccagcagacaaggtcctcctgaagactatgtggtgagttttaggaattggaaggctactcaaggataatttttgaggctgttggtagaggaatggtttgaaggcaatgccattccctgtccttcatcccatccttgtgtcctttatttggtgaggcctccctcattctgtgatctttagagatccagtattgcaaagcaaccccttcctcaacttgcccccagctccattatcctcaaaacaaacctggtgaatcattcgtttggtatgtgtgtaatggggcttcttgctctcagcatagtcaatgtatatttcatcagcggttctctgctttcaggttgtggccatggaacagaggatgaagagacaccttctgaccagaatgtttctgtaggagtgtcacagtcaaaggcaggttcatccacacagaagactcaatcctgtgagatgtgtgtcccagtcctgaaagatattttgcatctagctgatctccctgggcagaaaccatacttggttggagaatgtacaaaccatcaccagcaccagaagcatcacagtgcaaagaaatccttgaagagggacatggacagagcctcatatgtgaagtgctgcctattctgtatgtcattgaagccctttcgcaaatgggaggttggaaaggaccttccagccatgttgcggcttctgaggtccctggtctttcctggaggcaagaaacccggcacaattactgaatgtggggaggacattcgcagtcaaaaaagtcattacaagtcaggtgaatgtgggaaggcttccaggcacaaacacactcctgtttaccatccaagagtctacactggaaaaaagctttatgagtgtagcaaatgtgggaaagccttccgtggcaagtactcacttgttcagcaccagagagtccatactggagaaaggccttgggagtgcaatgaatgtggaaaattctttagccaaacctcccacctgaatgatcatcggagaatccacaccggagaaaggccttatgagtgcagcgaatgtggaaaattatttagacaaaactccagccttgttgaccaccagaaaatacacactggagcaaggccttatgagtgtagccagtgtgggaaatcctttagccaaaaagccacccttgttaaacaccaaagagttcacactggagaaaggccttataagtgtggtgaatgtgggaattcctttagtcaaagtgccattcttaatcaacaccgaagaattcacactggagcaaagccttatgagtgtggccagtgtgggaaatcctttagtcaaaaagctaccctcattaaacaccagagagttcacactggagaaaggccttataagtgtggtgactgtgggaaatcctttagtcaaagctccatccttattcaacaccggagaattcatactggagcaaggccttatgagtgtggccagtgtggaaagtcctttagccaaaagtctggtctcattcaacaccaagtggttcacactggagaaaggccttatgagtgcaacaaatgtgggaattcctttagccaatgctccagcctcatacatcaccaaaaatgtcataacacatagaggcctcatgaatgcagcaaatgtggaagcgccttcaactcaagatctatcatcatttagctcctgaaagtccacacttaagtagagccttagacctacagggaaagtgctgtctctgtagtattgtagcagtagagagcctttgtgagggagccatctgcctgaagttgaacctcattcttccttgtttctctggtagaaaccatctaccctctaccaccttgcacagtgggcactggtcactcctatgtgctaagacaaggcagacatctgtgtgttctcttaagtctttggaggaaatcttgagcagtctaagcctttagagaaaattcattcttttttctgactgatcacagcatacgtgtgacccagtttgggtcaggagggcccagccttggttctgctggacacttatgtgcaaggattcccttcatgtaaattcttggtctcacatgacacttggtcattcttccagcctccatgtcaccacgtggtgaatggctgcctcacattgctccagtttgtgcactaataaaagccttatatttgaatctacctgtagtcttggggttctgtttactgtgtggggtggctgggagacagacttcaactctatatgaaggaatggatggcttttgtgggcctctgcaggaaagtaagatgacagagtaattctaattctggttttggtcatacttgctttgctacctaaaatctcctaggaaaaaatgcaaggttttggttattctaatttgtggcctggatccctattctttctgtgagactagaggtcatcctgaggagaggccagctgttatgacaagcatgtgtgcttcagggaataggacaattttattccattgtttccagaggatgtcatatgatgcccagtgctgctgagaagcttttcatggggttctataaggaggcatgccctgatatcaaacattccataggccgatgtcacgcagaagacaacgcgagtcacatgtgaactgtaattggtacagaaatacctgggtatttctgtactgtgtgtactgtagcaaactagttggaatgtgcctcttataaaagtacatttacaaatcttcccgtgactgtggctttgagcagtcataggacctagaaatctgtgtatgtccaatagctgaggttattttcagcaaaaataattaaagggttttattttttaattcttgttggttttctaggttgttcacctcaagtgcattgctgtagaggcagaaaaaggaggataaagataacagaagtcctataggccagggatgtattgatagctcttgtgatttccaccagtgttgctgttgtctcaaattgccacagccttcattgcttgccaacatttcctgcatggagggactcatggttgcccttccccaggcctgaagagagagtgcagtcaacatgagattgctaggcattctggtttctgaaagttgggtgatcagatactttattgtgaaacatgttttacaaactttcttgatgtgtaagtgacatgccatagtttacatccatttatggtgtataatttgaagagtttgtcatacaagcctgtgaaaccataatcatgatcatgaacatattcatgattcacctcttgctgttttacaatctctgcgtgtactttccaggccttcaggagtcctgtcatttactttccctacaggagaatagtttgtgttttctaggattttatgtgaattgaaacgtaaaatacttactccatttttcctgatgatgcacaattttttttttttttttgagatggagtctcagtctgtcaccaggctggagtgcagtggcatgatcttggctcactccaacctcctcctgggttccagcgattctcctgcctcagcctcctgagaagctaggactacaggcatgcactaccacgcccaactaatttttgtatttttagtagagatgtggttttaccatgtttgccaggatggtcttgatctcttgacctcgtgatccgcccgcctcagcctcccgaagtgctgggattacaggcgtaagccaccacaccagctgatgcacaattacttttaagatttatcaatattgcttatgtgaatagttcatttgtattgctgagaaatagtctgtggatatgtcacaatttggataaacagttggatgctttccagttttgggctgttgcaaataatgctactatgaacataggcatataactcttaatatgcagaaatgctttatttctcctgtgtcagtagtacagtgtacgtgaatgcgtcacttttaaagacaaggccagactataacctaactgtaccatttgcattctcatcaacagtatgtgaaccttcttatttctctacattcttgccatacttggtatggttagtctttttaattttagttgttttaatagctgtataatagcatctgtctgtgattttattgcatttttctggtattttatggtattgaacatttgaacatcttgtatctagttgccacctgtatatcctctttggaagaatgtttattaatgtcttttgcttatttttaaatggatgttggtgatactttttcattaataaatagacgtataacaaagacttatgttgaaactttactcattcttcagtaatgtgatgcacttatttgctaaatgataaaattgttttcaaatactgggaaaataatttctcagttttttggtctattcacagtgtaacaactacagacactatatacctgaaacactaccttcattgacaaattctccatcactttcttaggtctaaccattcaatgaaacaaataagccctggtttttaatatttgccaatttccctggtaaaatactcccaccatggccaattacaaggtgtcaaaataatgtcactgaacatgaattgagaagaagtgggtagcgtcacaccactgtattctactttcaccatgccaatacagtagccgcagataacctgaagatcatgtatgtaggaaccatacagcctgtggtgtggcaagactgatgccatcttgaagtgaagctgtcatggtcacctatgttctgaagcagtagcatagatatcatcaaaatgcttctctcccccaatggtcatgagtcttggcaagaaagtctgaagacgtgaagagctgcacgttttaccctaaaaactccaggccgggcgtgttggctcttgcctgtaatcccaacactttgggaggccaaggtgggcagatcacgaggtcaggagatggagaccatcctggctaacatggtgaaaccccatctctactaaaaatagaaaaattagccggttgtggtggcttacgggtgcctgtaatcccagctacttgggaggctgaggcaggagaatcacttgaatccaggaggtggaggttgcagtgagccgagatcacgccattgcactccagcctggcaacagagcaagactccgtctagaaaaacaaacaaacaaaaaactccagccttgttgaccactacaaaaagggtcctataaaggatgtaaaggaaactgccttctggagggcagatacagggatccattgtctcacagctgcacaagacatcacttctgttcatgagtccctatgaaatgtttctgaaaacaatttggcctcttcctccttctttggcctttcagcttcgttggcctttgggatagattttcatacacctgctcactatagaacaatgtatatataagagtaaaacagtaaaatgattaagaattgacttttgagtatttattacttgtgtttttaaaagtggcttaagtgaaatctagttgtcttaaattctgcatatttaaagtatacaatttctattttaatatatactcgaaaccataagtttccacctgccctttttagtccatccctcttaacaagtaatgggtacaaaaacttatttttcctcttctaatggatattttcaagtatatacacaaatggaaaggactgtgttcagatgcactatgaaacctttctaaatcttccattattacttatcatttagtagccattcttgtttcaactcttttcacacataattattttacttacaattcccacatcttgtcattcaatgctgcacctcttcagaatgcattttcaagcataagagctctttcataattcctataactttatcaatcattatttaaggcatcataaaatatatcatcagtgctcagtcacctcgaattgtctccaaaattgatttttaagacaaattcattgcaatcagatccaaaatgaatctatatggctattagtagtttcatctggtgagtctataataatacacagctaccactttttattattattcttgaagttgatgagacatttgtccagaatttgccacattctggaatggtgcgtgtttttgttttgtgtctctctgatgtcatttaacatgctgaccctttctccatattcctgtgcactagatattaaggaaatgggtaactgaactctggtcctgcagataggtgtgcaatagtaacacacttatgcagtgtgactgtgttgtgtgtatgtgtatgtctattcaaaaggtgacattcacagacatctggaggcttagagattattgaaaaagtaaaaaaggaagaagcactttgtttttgcttcctctaagatacctgagaaggtttctcaactgatttgaaatgtgaaacaatgccaaaacaattaccatagatccagtaatactgcttcttggttttactgaaatgagttaaacatttatgtccacacaaaatcttgtacatgaatatttatagcacctttgttcataattggcaaaatttggtagcaaccaaaatgtccttcagtaagtgaacaggtaagtgtggtacatttagaaaatggtatatttatccacattaaaataaataataaaagatatggaagaacttaaatacatatttctaagtgaaaggatctgatatggtttggctgtgtccccactcaaatctcatcttgaattataagtaccacatgtcatgggaggaacccagtgggaggtgattgaattataggagtgggtttttcccacgctgttctcatgacagtaaattagtctcacgagatctgatggctttaaaatcgggagtttagctgcacaagcttattctctttgcctgctgccatccacctaggacgtgacttgctcctccttgccttctgcaataattgtgaggcttccccagccacgtggaattgtgagttctccattaaaccgctttcctttgtaaattgcccagtctcgggtatgtctttatcagcagcgcgaaaacggactattacaggatccaaactaaaaggactacatactgtgatttgaactatatgacattccagaaaaagcaaaactatggagacagtaaaaaatgagtggttgccaggggtttgggggaagggaggaagggatgaacaggtggagcacggaggacttttagggcagtgaaactactctgtgatactaccgtggtgtgtatacaagtcactatgcctttgtcaaaacccatataacaaccagctagagtaaatcctaatgtaaactatggatttgggatgataatgatatgccagcgtaccatcaattgtaacaaatatactattctagtggggaatatttatagtggagtggctgtacatgcatgggacaagggatatgtggaagctctataattttttgctcaattttcctatgaaccaaaactgctctaaaaaataatctattaaaactttaccagcctgagcaacatggcgagaccccgtgcctacaaaaaatcaaaaaattatcagggcatggtggtgcaggtgcatgtctgttaccagctattctggaggctgaggtgggagtattgcttgagcccaggaattcaaagctacagtgagctctgattgtgccactgcactccagcctggatgacagagtgagaccctgtctctaaaaaaattaaaattaactaatttgcaaattagtttaaaatatgtattttgcaatgtttgtgctgtgtatttgtataactcaagggagattaattttaacaaattgaatttggcaagccagttatttccatgagcagcctagttaatttatctacttaaacaacaaaaacaagtagatacacagattttctggcactttccaagctcactatttccctactttgactattggcctaagaaattgccataagagctgtgtgtacctgtagccccagctacttgggaggctgaggcggaaggatcacttgagaccaggagttttaaaccagcctgggcaacatagcaagaaccctgtctgtaaaaaaaaaatatatatatattttaaaaattagctgggcacagtagtgagtgcctgcaatcccatatactcaggaagctgacacagaaatgtcgctgaagccgaagagtttgaggctgcagtaatctatgatcctgccactgcactccagcctgggcaacagagcaagactcttcctcaaaaaaaaaaaattaccattagacactcaaatatgcaggcaaaatgagtcctttgtggagtcactcagaagggctccccacttacctttctatatgaaatcatgctggagccacaccttctccctttccttttcagacaggacttaaattcagcaactgaagagctatctgctctatgtgtcttcagggtaaacatttccagagccaagccaaatgtacttatagacttatatatgactgcactaaaaaaagcaaagtaagtctatgttcagttcaattaattatgttcaatattctttttttttttctctctactgagatggagtctcactctgtcaccaggcaggagtgcagtggtgtgatctcggctcactgcaacctccacctcctgggttcaagcgcttctcctgcctcagcctcccaagtagctgggactacaggcgcacgccaccacacccagctaatttttgtatttttagtagagacagggcttcaccatgttggccaggctggtcttgatctcttgacctcatgagccacctgccttggcctcctaaagtgctgggattacaggcatgagccaccgcgcttggcctagccacaagattattaatagttgtgacgtataatgttttgtgtcgacttgcctgcattaagggctacccaaatagttgggaaaaccttagtacaggatatgtctgtgagaatgtttatggaagatattagcagttgagtctgtagacaatgtaaaggagatctggcctcatcagtgttaggggccaacatccaatgctttgagagccaagatagaacaaaaaggcagagaaagagcaagttactctcttcttgccctggatcatccaccttctgttttccaacattaaagttcttggatcttgggcctttggactctggaacatacaagaatgaccctcacccagttctcaggccttcagcctccaactgggaatttcaccataggctcccttggttttcaggccttcagatgcagactgaatgataccacccaccttcgtgtcttaccaggttgcaaaaggtatatcctgggacttcttagcctccataactggatgagccaagtcccataataaatcccctcttgtacatctatgtatcctattggttctgtgtttctctggagaatcctgactaatacaataggtttcagtaattttcatttcacaactgtttttctaagatgatctcaactccccatgcaagcactgtccctgcagtaacagtatcaatgatcaaaatttcccatcaaagagatgaaagctaggtgtcccaaacctttattctggtattctgatgtcccctttgcacaagtgctctgactgtgaacactacagacactgttctactttaaaatggcatatgctaagtggctcttctgtttagaaagttgctacaatcctaaaagaagcatatctaagaatatggaggaagaaatattatatgaatacaacactgttccttacagggctagacacactcaccgattacacaggcaggagaggcattttctgtgagacaaaattcctctttcgtcctccagcttcggtgcgatctaacggatgttttatcattcctgtcatggcgctatgtaaactctatttcccttattccttactgagcataatgaaactcacaaagctgactctaacgttctactttacataaatgtgtggagaaagaaggtaatgtttactaggctctcgccaagggtagaggcattttgtatctgaataactctgactacctaggtgactagttgtacacaataccctccaaaaatctctgtatggtaccttaaaaaagcagcgaagctcctcccttgtccaaggaggctggagacaccacctctcagccttcccctccacctttctccatagcaacggggtcattcctccctgaggtccaggagaagggcgacctctgccagcccaagaagcggtgagaactacattacccagaggcccgtgagccaggttcttggcgtggagccaatgaggctcaggggagggacatttccgctctgtccaacttgtcggagcggaacttccggcgtcctccctgtggcgggcactttggcttgtgtcagttccatccgcgggtgccggatctggacctaggtgctgacagcgagaaggcgcgaggagagtcgttttctcagctgcacagccggggcctgacggtcgccggcggtggtgacagctttgctcttgtctccgcccggatcgtccaccgctcccggcccgctccgcccagagtccgatggcggcggcactgagggccccgacccaggtgagcgctgcgtcctcccggcctcctctgccctccccacccgaaactgagggacgcgtgaagggttttctgcagcccggaccgcactgtccggcacagtgaggcgctggtgctggatctcgtttctggtagtgtggcagggagcgggagagcgacacggtcagggggctgcgcgggcaacagcttggagctgcgcctgagccgggaggctggggagacccaggccggcctcacgcgtgcaggtagcagagggtggggcagcgccgcgctgcattggccccactgagtttcaccagcacactgagggccacagcgcgtaggacagaagaggggcacggccccagtcacgcttctaaaagtttcacaaaagctgttcagaggaacgcgctggaagggcagtgatgatagcaggcatggagggacctagtctttttacgaggtcacaaagctggtaaaagtcagcaccaaggactgacacccagatacaaagcagtcatccctggacacctggctctggtgttccacattggaaccagaagtccatggagccacactttggtcacctgcctctcagaacatgtttcctcccacagattgccactagtacttacaggtccgtaagaagcacttgaagaccctacaagggtaagtggaggaaatccagaagctcattgattccagcaatgggatctctaggattgggactgtggtgacctgggattctttacttaccgcttttccaggccttgagcctagggactctgaacaaaaatatgtccagggtgagtattatatgaggtggtgcctgttgctggcaaataataggatgaatgtggaagtttgtcccagagataagtacaggtgtttggagctgcttggaggtgaggctgagctggttaagagaacctcaagtctcatttccttctcatgggaacagagagcagaggtacaggagttagaaactaaatggctgtctcagatgtctttgttctggagatgatggcagcaatgaagatttggagcagaagagggaggtgatcttccccaggcctcatgaggctcctgtggctgagcacagacaacagactgtgggtttaagggagttggtagcaataccaaagaggaaagaggagactactgcaatagtccaggtgagtgtagatgatgtgggccagagtagtggccacagtgtggcagaaatggttgaattttggattgtaggtcggctctgattttctggtattgggactgagagataagaaggggtgactcaaggctttttgagtttagtagctggaagcatagaagctccatctactgggagagccaagtagatagtagaattgtttttcactcaggacatcaggaatgtgttttgtccatgttaaaaatatgagatgttttagagaataagtaagtagctatatcaagtggctaggtggacacacaggtcttggactctgaggaagggtgcaggatagagacttctacaaagagtggaggatattattgaactaggatggagccctatgtctgttaggccatttgcattactataaagaaatacctaaggctgggtagtttataaagaaacaaggtttattacagcttatagttctgcaggctgtacaggaagcttagcgctagtctccacttctggtgagggcctcaggaagcttccaatcattgcagaaggcaaaaagggagccagcaaggcaggagggaggcaccagtctctttttagcaaccaggtctcatgtgaacttattactgttggaaggatactatgccattcatgagggatccacctccatgacccagataacctcccactaggccccacttccaacattggggatcacatttccaggtgagatttgaaggggacaaatatccaggctatatcagtgtcttaccttgggttgataatgaaataacctatattggtggcttaaacaacaaaaatttgtttctcacagttctgcaggctaggaaattctacatcagggtgcctctagattcacttatttgtgatgggctgcttcttgacttgcagtggctgccctcttgctttttcctcacatggcctttcctgggagggagtatgtaaagaaagcaaggaatctctttctttctattcttacaaaagcattaattccatcatgagggccccactcttttgaccttatctaaatctaattaccacccaaagattccatctccaaatactatcacattatattaggcttcattgtgttagtgcttcaatgtaagcattttgtgggtgggcgtggggcagaaacattaagcccataacatcatagatcccatttagtagtgggattcctggtcatgatgataatattaatagcaggccaggaaggggaagggtgggagccacaagagggtaccatacttgggtatctggatggatgttgtggaaatcacaaatacaggttatagagggaagcagccctaggaataatacagagagaggataccaggcaggtggccaagggttatgaaggatgagtgaatataagatggatgtggaggctgcattagtccattttcgtgctgctgataaagacatacctgagactgggaagaaaaagagggttaatggacttgcagttccacatggctggggaggcctcacaatcatggtggaaggcaaggaagagcaagtcacatcttacatggatggcagcaggcaaaaagagagtttgtgcaggggaactcctctttttaaaaccatcagttcttctttttttgagatggagtcttgctctgttccccaggctggagggcagtggtgagatctcagctccctacagcctccacctcccagactcaagggattctcctgtctcagcctcccaagtagctgggattacaggcatccaccaccacacccagctaattttcgtatttttagtagagacggggtttcaccacattggccaggctggtctcaagctcctgatcaagtgatccacccgccttggcctcccaaagtgctgggattagaggcgtgagccactgcaaccagccttaaaaccatcagttctcgtgagacttattcactattgcgagaacagcacaagaaagacccacccccatgattcaggtacctcctactggatccctcccatgacacatgggaattgtgggagttacaattcaagatgagatttgggtggagacacagccaaaccatattagagacataatgggatttcagacaagatgaggctgaagccagacctaatgctttactgctatatagcctcaccaggatcttatgactggctcctatgcctagggagtttcatgcaggctggtggatcagtttaggggcagaagtagtcatctgggagcatcacttaaccttgggtggagggccaccaggcaaggttttgaatgaagggtagcaagacagttactgttactgttactgtttagtgcagttactgtttagtgcagtacaagttggaaagggccatgtgtatctgagatatgtatgtggttctgggtggctgaggttgatgaaaggagtagactcaggtaggaagggcttcagagcaggatatggggctgcctgtggcagtagggaccatcataggtctgggtagtcctggaacttgtttgaatttgcaagcactttctagatgtcttgtgctgagtaacatataggaaggcaggagagatgcctgtgttgtgggatcggggtggaggtggctgagggagtgagttgggtaagagaggtgtggtggaaagagtgatgcacatatgaagacggagtgtgagcttttgtttcatgagtctggacattgaggacatgagggtgaaatgtgaacccagaccttcagttgtgtttgggagccatggtctgagggattccaggagaatttatagacacaagaatgtggtttctatctgtccacctgcctgttgttgctgtgggagaacacagtgaccaatgagaccatgagagagtaggcatcagtggcatcagggcctgttgtattcgctgaggtggggagatggggaggagggtgagccagggatggatgtttgggggaatcaacttggggtcctaggaaagatgctgaccatggaatgaactgtccccatcatagcaggtttttgtagcctttgaggatgtggccatttacttctcccaggaggagtgggagctccttgatgagatgcagaggctcctgtaccgcgatgtgatgctggagaactttgcagttatggcatccctaggtaaggccctcctattcctcccagtttcctttgtgggtctctccttttcccctgtccctgaggcagctctgtcctttcttcagttagaccctgagctctacagaccttcccactttcttggcatatgtattctgagggacatcgccaagcaaggcactctcagactgtcctaacacctgtttcctctaggtatgcagtgaagggtctgggagacaggatctttctttcaacctaaaggatttgtccttgccttctccatgacaggatggctttctccagttctaggatgctctttgttccatgttctgccttttgcttctaactaaaatctcaagctgcctgtttcaggaattgcaggtatcatcatgttaactacttaactggtccataggcttttcataaagatccacctgaaagattttcttgtaacattatttttcactgctgtagtttgtcatgtgctgagttgctctgtgccagtgctggctgtgcacctctctggtcttccctttagggcatacatcttataggtctggtatagttgcacaactgggattcgaggatggctctggttgctttacagggtgcaaacagcaagatagtctcagaggaggcctggccctaatgagtgacaactaagggagggcaagacactagggctgtttctaatcacaccataaacctgtcctgagttctcagtgattgggtgctgattccataggacatatatcatttctctcttttttttcttttctacacatgttctgatttttatttcatccatgacttccagcccttagctgctaccaatttctggcctccatgtgtcacctgttcctttccagtgcaacttctagagtgttctctaacactgacccacatgtaatatgttgtcagatgtgcacatgtttttaaatagtccttccacacctagtattcagttcccatgggtgtctactgggcctggacaccaataatcttctgtgcagtgtaccgaagtcctctcttctcatcaggggaggaagtcctgataaaagcttttggcagaatagtgagtcagagaccctacctgttctctctgagttgtgccccatctttgtgtctttcatctcataaggcctcccttgttctgtgacttgtagaggcttttttccacaaatttccaccagctctcatatcctaaaaacattttcttagactcattctttgacacacatttttgatgtaacttctcacaccatagtaaatctgtgttttctcagcatttctcttctttcaggttgctggtgtggagcagtagatgaggggacgccttctgcagagagcgtttctgtggaagaactgtcacagggcaggactccaaaggcagatacatccactgataagagtcacccctgtgagatttgtaccccagtcctgagagacattttacaaatgattgagctccatgcctcaccctgtggacagaaattgtacttgggtggagcatcaagagatttctggatgagttcaaaccttcaccagctccagaagcttgataatggagagaagctctttaaagtggatggggaccaggcctcatttatgatgaactgcaggttccatgtgtcaggaaaacccttcacgtttggggaagtcgggagggacttttcagccacctcaggacttctccagcatcaggtgactcccaccattgagagaccacacagcaggattagacacttgagagttcccactggacgaaagcctctcaaatacactgaatccaggaaatcttttagagagaaatctgtattcattcaacaccaaagagctgactctggagaaaggccttacaagtgcagtgaatgtgggaaatcctttagtcaaagttctggctttcttcgacacaggaaagcacacggtagaacaaggactcatgaatgtagtgaatgtgggaaatcatttagtcgcaaaactcacctaactcaacaccaaagagttcacactggagaaaggccttatgactgcagtgaatgtggcaaatcctttcgccaggtatctgtcctcattcaacatcaacgagttcacactggagaaaggccttatgagtgcagtgaatgtgggaaatcttttagccacagcactaacctctatcgtcacaggagtgcccacactagcacaaggccttatgagtgcagtgaatgtggaaaatcctttagccatagcactaacctctttcgacactggagagttcacactggagtaaggccttatgagtgtagtgaatgtgggaaagcatttagttgcaatatctaccttattcaccaccaaagatttcacactggagaaagaccttatgtgtgcagtgaatgtgggaaatcatttggccagaaatctgtcctcattcaacaccaaagagttcacactggagaaaggccttatgagtgcagtgaatgtgggaaagtttttagccaaagctctggcctctttcgacacagaagagctcacactaaaacaaagccttatgagtgcagtgaatgtgaaaaatcatttagttgcaaaactgacctcattcgacaccagacagttcacactggagaaaggccttatgagtgcagtgtatgtgggaaatcttttatccgaaaaacccacctcattcgacaccagactgttcacactaatgaaaggccttatgagtgcgatgaatgtgggaaatcctatagccaaagctctgccctccttcagcataggagagttcacactggagaaaggccttatgagtgcagagaatgtgggaaatcttttacccgcaaaaatcacctcattcaacacaagacagttcacactggagaaaggccttatgaatgcagtgaatgtggaaaatcctttagccaaagctctggcctcttaagacacagaagagttcatgtgcagtgaatgtgggaaattattttgtcacttttttttttttttttgagatggaattttgctcgtcacccaggctggagtgcaattgtgcaatctcagctcactgcaacctccgcctcctgggatcaagtgattctcctgccacagcctcctgagtacctgagattacaggcacccaccaccatgcccagctaatttttgtatttttaatagaaacaaggtttcaccatgttggtcaggctggtgttgaactcctgacctcaggtaatccacctgcttcagcctaccaaagtgctgggattacaggcgtgagccaccatgtccggcttgtgttgtgacatttaacacaagatttcccaaagaagaaaggccttatatatgctgtgaatgtgtttttgcttgttagtttgttttaacttggtatgacggcactggaggctagcctttgagaagagccttctctgatgtgactcatgtatccaaacatccatggatttcccataaatttgaggtatgtgggaagcatgtgtagctatgttgtactctctaaacctgcccagggaccttaccagattcgtgtcactgccagtttctgcggctgaagccttttcatcactacccgctgggagacccacagagtgtgcatcagtcaccaccccaacatgctcagggaggcagagttcttccattagttggaggaaagcacgagtagtctaagctcttaggggggtttctcatttcctcctgtggctacatagtgcatataactaccccagtgttggccccaggacctgatctgagttctgctggcagcttccagaggattgccttttttgaggacattgttgatctcaggcgatgcttgtgatgaagcattttttagcttccaccacttaccaggaactgcctgttaactggcttgtgcaatgataaaggccttttgtttaagtacctttaatcttgtaagttgtattaattgttgagtagtttggaaacataataggactctgtcagcttaaaagggtatataacatttgtggggattcaaattttgtttgcctcagaggggacagtatgctcacagaatatagattttgctccatttttggcctatttcgcattgtttccaaggccttctaggagacactgcagggctttctggctctgatttttgcctgcatgtgggctcagaggtcattctgcagagggggcagttgtggcaacttccattgtttctggagacaacacaaagtttttcttgttgagtgaggatatcacataatgccctgcaatgtttagaatcccttaatgaggtcctgtgaaggagctgtgtcccttgaaacacagaattcagtgagctagtgtccctagctataaaaccatggggctggagcgaaacataattggtaaagaaacgctgggttgaataatagggaatggaggagactgcagcaaattagatggactgttcctcatataaagtttcatccggccgggcgcagtggctcacacctttaatcctagcactttgggaggctgaggtgggtggatcacaaggtcgggagttcaataacagcctggccaaggtggtgaaaccctggaaggctgaggcagataattgcttgaacttgggaggcagaggttgcagtgagctcagatcacaccactgcactccagcctgggtgacagagcgagactgcgtctcaaaaaaaaaaaaaaaaagatccattcaggccagtcacagtggctcatgcgtgtaatccctacactttccgaggccatggcgtgcagatcacttgaggtcaggagtcagagaccagactggccaacatggtgaaaccccatctctactgaaaatacaaaaattaaccaggtgcagtggtgcacgtctataatcccagctgctctgaaggctgacgcaccaagaatagcttgaacccggaagtggaggttgcagtgagctgagaccacaccactgcactccagcccgggtgatggagtgagactctgtttccaaaaaaaaaaaggctgggcgtggtggctcacgcctgtaatcccagcactttaggaggccgaggtgggtggataacccaaggtcaggagttcgagaccagcctggtcaacatggcgaaaccctgtctctactaaaagtacaaaaattgtaaaagtaaaaagtaaaagtaaaagctgggtgtggtggcaggcaccagtaatcctagctactcaggagacaggcagaagaatctcttgaacctgggaggtgagccgagatcgcaccattgcacttcggcctgggcaacaacagcgaaactctgtctcaaaaaaaaagtatccacaaatgttccagtgactatgactgcaagatcactgtgtgcagaaatctctagaaatgtgtgtcttgtagctcaagttattactagagacaacaagggttttgtggattcctgtagcctctctggcctgtttacttcaaggccattgctgcacagacaaaaaaaaaaaaggatgaagtcaagagagattcggttgtccttggtgcggcttttgtgatccagtagcaatcctcttaacgctgatggaaatggccttcattgctcacctgtatttcctgccactgaagcaggtctgcctctacgtggcctggggagctagatggtagagtcaatagagacttagtaaaccagactttttgaagtgtcaatgaccaagattgttattgcatccattaaaaaaaaatcaagttataattgatgtggaataaattatatatatttaaagtgtacaacttgataagttctgacataaatgtaaacccatggaagcattgttgtaatcataagaatgagcatatctcacctgcatattttacttttgctcttttataatacattccagaatatgcaggcaacttttaacattcctttacaattgattgacttgaattttctggaattttattttagacatcataaagtgtgtatttttttgtgcttttatttataaaacttccccttaggtaagggcctgaggttaactttggaggtgacagatatgtccaacaccattgatagggtgatgatttcaaaagtgtacatatgtgtgtgtgtgtgtgtgtgtgtgtgtgtgtgtgtgtatacttactgttttaatatgtgcagtacattgcatgttgattacacctcaatgaacctataaaaagttattccatttaaaaatctgggcctcccacttctattggaaactggacaacttgacagcctgcagtgttttgaaacagcatggattgggtgtcttgtttccagcatatgtcccatgttccccaacactgttcctcaggaaacagggaggaacagctgttcctcaggacctgctgagtggccatattccctgaaggccagaaaagtaacaaggtgaccgttttggacaaaattctgagcttaaaaccttgcctgaatcagtagcccccaaattcattgtgcacatcttataatttccaagaacacacatattaagtgaatatttttatgtttataattgtgaaatggtctgttcagggctgtcattcctcaaccttttttttcaaccaccctctcattaaggaagcatatgtattaatcatggtttctgttttttgtattatatgtcttgacatcttaaaattcttgctggtgacagagagacttaccctaccagaggtagctaatttctaaaaatagtaaacaactaccttgagagcaaggcaagccaactaccctctttatctaactcttactcaccaagccaatactttccctgcactaaatcatcccagcgttactgccagtgattttgcagcagtctgcagcaattttggtccttgcctcctcagaagaaaattcaaccgaggaggcagaggttggcttaaggcacaggaagagaccaaggcaagttttttttagcaggagtgagagtttattaaaatgttttagagtaggagtgaaaggaatcaaagtacacttggaaaagggccaagtggataacttgagaggtcaagtgccccacttgatccttggcttgggactttatacatttgcttatttcccaggctctttattctccttccttcggtaggctgttgcttgactactgcatgcacagtggtctgccagtacttgggaggggccgcatgcagtttgtttactgaagtcatacatatactcatttggggtgatcttcccttaacaagtcatgcacccccagaggaaggtcaaataccagtcaaattttgccatcttgccccattttgtgcatgctcgaaaccttatcaggggttgtggttcactggctccaggtgttttctatctgttggaaaactcttttccctcctggtaccaatcatggccacttatcatctcagagggatagttttatgctttcctgtccttcacccaatgagagctggacatctcgggggtccctctcttgttttgtttattatctcagaggaaaagatttatgattgcctgtccttgactccaaaattgcctgacattcctggggtccctctctcctgccctactcttatctacctactctaacaccagggtgagggtatgaggcaactagagaccacccctgtaaatcgaagccaaccagaattattcagactagccagtactcagctgtttgctctgatctggcctaggctttcccctagctcttgcttcttcctttagactgaaacctgttcctcctgtggccctgcatggcatactgtacttcccatttctagggaaattctgagtaacattaaacttttatttcactggcattgagctctccatgtccttttccaataaagacccatccacaaattggcctctcttggctatgtaatattacatatctttccagcacttctcaatgccttcaccttctcttttctccattatgcctgccacattctaacattccatataatttagcatttttttcatatttcctcctctttcttgagtacagcgtaagctattggggtctgtctcttgttttgtaaatgtcccatgcagttaagatagtgtctgaaatacagtaggtgttccttgaatatttcttagaactatgaataagcataatactacagcatccctgttcaccttaatattctgatagcactttctaaatgttttctttacttctccttccaggtattattgagtgttttcaagaatgaaaagaggcctggcatggtggctcacatctgtaatcccaactttttgggaggctgaggtgggaggatcccttgagcccaagagtttgaggctgcagcaagctatgatcgtgccactacactccagcctgtgcaacacagtgagatcctgtctccaaaattaaataaataaataaaattacattttggagactaaacgctgcttgtagtcatagttctaacacagctgtgtgctcagcttcatttgctcacttctcagaattcaatgtctcctgctcaaattttgctgtcatcttaaccgttttcacttatcacagatatgtttctccaggtccatttcgtcatgtatctgtgaataactacagaattattaactttgagtaatttggccgggcgcgggggctctcctgtaatcccagcactttgggaggctgaggcgggcagatcacgaggtcaggagatcgagaccatcctggctaacacggtgaaaccccatctctactaaaaatacaaaaagttagccgggcatggtggcaggcgcctgtaatcccagctactccggaggctgaggcaggagaatagtgtgaacctgggaggcggagcctgcagtgagctatggtcgcaccactgcactccagcctgggcgactgagcaagactccgtctcaaaaaaaaaaaacacaaaacaacttttgagtaatttaaacaattcacaaatgtttttgtctttctttccccatacactcgcccttttcttttttaaaaccataaataaatctcaattctcaattcagacactgtcggtgtaattgcaggtgaaatgagaatcacctcccagccaagaaatctgatcccaattttccaaatctttatttctgggttcagacaccacattttcagcccctgtcttggcatataaaagcatttataatggttcttcttttcagataagaaacatcaccaaaaggaaatagatatatctcaacttttgggctaggaactctcatttggataaaagaatatttctcctttggttggacattagtgaccatacaggcaggaaaggtgccttccttgaccaccttctctcgcctgtcttcctcctcatggttctctcaggtattttttttctgaggaaaccagaggaagagctctatattagtccacttgcctcagggagctccagcatccctccatagccactgtctggagaccattcttccactccatggccctgcctggggacaattctctgttaactctgacccaactgaggctcacaaaactgactcaaagcttccctctacagtacacatattttttaaatgaaggaaatttgactgaactatgagtggactcagagtgacattggatgttgtgtgtccatttggtggtgtggcttcagggaacatctgtaagaatatatcccaatatttcggggatccctgcagacctcactacacaagacctggttgagggtcctttaaaaggagcgaagccacgccctgacctcagagtctcagggcataatttctcagcgcccctcgcagtaccatttggcctttgcccagcgtgcaggggagttagccgtcaccacggccaagtgcacatgagaactgcattgcccagaaacctgtgcgccgcccggcggcggcactcttaggggcgtctccctgcggacggaagctctctgggcgggacttccggtatcttcctcgcggtggacatcttgtcggctcttaggtggaaccatcggagcagaagctcggggttgctgggcggttccgaggtgacggaagcgggagggtgcgggagaagtcgctgttcgctctgcggagtggctcgccagcgaagaccccgcctgcgcccccggggacggacgaccgcggtgccagggtcccgcgacctgggaccccctcgcggctccgggtggtctacgaactgtgatggcggcggccgcggtgatgggcccggcgcaggtgggtgctgcctttcccagactttcgcccgccccaaatcctgaagttccaaatgaggagcgcctgtctgagtccctgcagcgcaggccccagtgtccaaggcagcggggcgctggtgggtgggggcgagtgtgactggcagaggggcagcctgagcataggtttggagctggactgagcccgtagcagtcgggagcgtgtgtgaaccgtagtcaggcctgcaatgtcgaggggagaagttgctccttcattgcgaggacgataggagccatggcgggttttgaatggtggagggaagggatccgaaaaaggatttttaaagtattccaatgtttgctgaggaggaaaccgactacagtgaggtagaaacgatgaggatggaggcaaggagacgtttgaggaggtccctgcaacaaactccagaagtgttgcggtggtggctgggccagagcagtggcaggaggggttgggtggggaagtcatgagattctgggtagatttttaaagatggaaccaatggggtttcctgccgcatcagatgtggtcgtgagtgaatgtagggaggaaagggctatccagggtttttttggcctgttttccttcctgaacgtgtgaaagaatggaaattggtaagtcacagcagggagcacgtttcaggggcatcaggaattgggttttggacttggtgaatctaaggtgttctgcactggaggttcatcacgggtagctgaacatgcaggtctggggttctagagagggagttgtgctagagacttcaatgggtgaggcataaggtcaaagcctgtagtagatcagatttagagggtggaatttcaaggaagttattttgtgtggtctctgaagtgagaggtgggtttagggtggaaggccagggatgaaggggtggacacttaagattccttccagaaaggaggggtcctggcatgtgaaagcattctagatggtgttgttggaagtcaatgcttggtgctgcaaagtgaaaccagcactcaggcaaaagttttctcagcaaggcaatttacttctgtgcaagtgtgctgcctgtgttaatcacgatcccaagagcacactgaacaaaggagggaaggggtttttatctctaacccatagtccctaccttcctctgtgtcactcccccatgggctggggtcggaccgcttaatctaagctgagccaattgggtatttgtgagtattttccaaataaggaagagggaaggggaaggtgagttacagtggtgggacatgtgagttgtgtaggacgtgtggttttggcgggggcaatgggtgcaaagtgagtaagggaacagatgtgaattattggttagtgcttacaggaaggttgtttatagtaactaggggcaaggaggcatggagaacaagaaaggtttgagaacaaagaacaaggaagttaacaggctaaacctttgaagaggaattttattatatcttatagtgtcagcaagaggagagggctgtagagcataagtagcctggcctgcactggagaccaaggtgagggatgcagtaggtttgccaccctacaggctcagcatgccttcatgggcgctgcctgtggagcagtcccatccccaaccagtgcattggtgcctcagttacccaaaccctcaggtaagcagaattgatgaacatctctaatgaaggatcactgcagctccccttcagaggaatatgtatcaggtaggctggtttagtgcaagggctagtgtacaccttgcaagtacgcagaaggaactaaaaaatgtatgtacaaagtaagggaaatttatactagcacttaatgattggtcaaaatattaagttgccttgaagtattttattacaatggaaaaatcttaaccaaattttcttaaaagctttaaagcaggcaaaacaaacctaatttttcaaaaactcatcagttcatttgcatggatagtagtagctgtttcaaaggcacttgagatgtacagacaagcctgatacaaacagtagccctatgaggtgggtgccattattatccccacttttaagatgaggacactcagacgctggtctttatgttcacacagctggtgggagccagcactgagatctgagtatctgaagttagagaggtaacccaaaatcattcctgccaaagggcagggtaggcagggcttagggaaacagttcagtcgatgagatcccactgtgggaacctgccactcccagcttccctcctcttgtgaggttgccatggtggcagaaacttatgattcctacctagatgagagtagattgtctcaggccctcacttagcccaacacacccccattatctcagcaactcagtgtggagaatgatagtgttctgggactcttcagtgtcccttctgcctaccgttcttggaggtcctgcagtcacccaaagctctgtgttgtaaattctgttttggaattatgtggaagggtttctatttctggcaagcaatgggatgaaatgtggaacattatctcaggcataggaaccagcatgtgcaaatacttaacttaaggctaaactaggagtgttcagggaacctcaggcctccattatgtctggtgggatcagacagcagggacaggattcagcccagaaatggcagcctgaggatctgggtttgtatgctgagagaattgggagccactgcaggtttggagctaggagggagtgatctgactttggtcttaaccaacttcctctgtacagtgaaaaaagactgtgggagtgaggatgaaggaaggaataccactgaggagcttaatgcaacagttcaggttggaccagagtggtcgctgtagaggtgggagatgtggatggattctgaatcatttttcttaaagtgggaccaaccagattttctgatgtggaagatgagaaagaaaaggcaaggggtgaaggaagaccctggattttttagtctgagaagatataaagatgccatcaactgaagtgacaaagttggtggtaggagtacctttcagaggtaatatcaggagtgcagtttggctatgtggaatctaccatgttccaaagacacttgagtggaggtgtcaagtagacagctggacacagagatctgaagttcagagaagggattcaggttggagctatccacagggtggcagccagcatgtggatcaggatggagctttgcttccaatttagagagagaatctttaggtcatggtgacagtgccatcagcacactgtaagggcagacacagcagggtagaggtaggggccatcttagagtctagaagagggagggaaatgtccctgggaggaaggggaataatagggtcaggcaggtggcaaagcgttccaggcagagagtggatgtgaggtgaagtactgtagtaatagaagtgaggtggcagtgaggccagagccagtgcttattcagctctttatgtgctcctcaggcttccatggtgacctttggtgggacctgtggagtttcagtcaagctagtgaattagcccagggacagattgggtcagtaggcagaatccctgtgcttggggtaggtgcccagtgagtgtaggttttgaatgagttaaatgttgagaagcctgtgactgacctcagtagtacaacaacaaagcagaaaagggctgagtttatctgggatctgcacatggttctggattgctgaattgacccatgaaatagagccaggaggggaagatttaataggtggattcagggcaacccatggcagtgtggccgttgatcaggaccagatgtaatcctggatgcattatccaagcattctctggatgctgtgtgcagatttgcatgtggggaagccatggaggtaccagtgttgtgggtgtccatagatgtaaaggaggtatagccaaaagggtgatgtgcacatggagatggagtgtgaattcatgagcccagagctttggtatggagggtttctgaaagaatgcttagctcaggtttgtgtatgaggaataatctgttgatccccagggagctggctgataggagaagggttgggtcctacataccaggcccatggtgttttatctgtccacttgcctgttctgagctggacaaaatgattaatggaatatgagtcgagaacaggcaccaatcacaccagggcctgttatctcatttgagttagatgtgacaaggagtcctggagagagaggctgtccttaagctcagttgtccacctcacacagggctatgtgaccttcaaggatttatttgtttacttctcttaggaggaatgggagctgctggatgaggctcagagactcttctattatgaaataatggcttctgtgcttcgcatttatagtctccctgggtaaggccccagtatcccatttttctgggctgggtcctactcttcctttttgccctaggggttgctctttcctttccatagctagagcatgggtactgctctcttctctgattccctcacataggtcccctgggtgcctaggctcagctagatgcattggcccctctcttccctgtgttcctcaactcctgctgccctgaagccttgccaggaagggtttggaggtcaggggtcctaaggtgacccagtgaattctgcttggcctctccctggccaggtgactgtccacactcatgacacctctggactccaggctccacccgcttcctctaattgtaatttccttgagtctgcctgtgtcctcaatttcagtcatcatggtcaccacttgtgggcccactgcactgttcctgcaggacaattttctgaggttcattttgtagcatttgttttcttgcaattttgcatgggtgggctactctggctagtgctctcagcctgtttcacctttcccctatgctttgtatcttccagatcctctgtggttgttgaattgtaacaagagagagaactctggctgcctgagagggcatgactctagtcacagcaggaggggcttggacaggccctggtgagtgggagctgagggacgccataacctcagggctgggttcctgtagttccggaaacctatgttgtgcccatcacaagtgccaaggccagaggccctaacttatttctacctttttatccccattctgtacactcttgtcatttctaatctgacttctgacccagggctgtcttctcccattctctaccagaggggctctagtagagcaatagctctctctgcgatgctttccaatattgtactacacttacactattgtgtcataagatgtgtgcatatctgtaaatagtccctgaacacgttacttatttttaatcacattttcctgggcctgtactcacatttcgcataggagtcacctgtcacccacagtcagccaaggtcctgctaaaagtcattgcagaggattaagttggagaccttgtactacaccccatcctcgtgtctttgtttcttgtgaggccatctccattctgtgactcttagattccagtactgtacagcagcccttttttcaacctgatcctagctctgttccaccaggaaacttaggtactcagtcctgggtacagcagacacatatttgtgatgtagttgccccacccaccaaagtcagcatgtacatcaatagtatttttctgccttcaggttgttggcatgaagtgaaggatgaagagtcatcttctgaacagagcatttctatagcagtgtcacatgttaatacttccaaggcaggtttgcccgcacagacggctctcccttgtgacatatgtggccccatcttgaaagatattttgcacctggatgaacaccagggtacacaccatggactgaaacttcacacatgtggggcatgtgggagacaattctggttcagtgcaaaccttcatcagtaccagaagtgttacagtatagagcaacccttaagaagggataaaagtgaggcctcaattgtgaagaactgcacagttagcaaagaacctcatccgtcagagaagccctttacgtgtaaggaggagcagaaaaacttccaggctactttgggtggctgccaacaaaaggccatccacagtaagaggaagacacacaggagcactgagagtggggatgcatttcatggtgaacaaatgcattacaagtgcagtgaatgtgggaaagctttcagccgcaaagacacacttgtccagcaccagagaattcatagtggagagaagccttatgagtgcagcgaatgtgggaaagccttcagccgcaaagctacacttgtccagcatcagagaatccatactggagaaaggccttatgaatgcagcgaatgtggaaaaaccttcagtcgaaaagacaaccttactcagcacaagagaatccacactggagaaatgccttataagtgcaatgaatgtgggaaatattttagccatcactccaatctaattgtacaccagagagttcacaatggagcaaggccttataagtgcagtgattgtgggaaagtcttcagacacaaatctacacttgttcagcatgagagtattcacactggagaaaatccttatgattgcagtgattgtgggaaatcctttggccacaaatacaccctcattaaacatcagcgaattcacactgagtcaaagccgtttgagtgcattgaatgcgggaaattctttagtcgaagttctgactatattgcacaccagagggttcacactggtgaaaggccttttgtgtgcagtaaatgtgggaaagactttatcagaacctcccaccttgttcgacaccaaagagttcacactggagaaaggccatatgagtgcagtgaatgtgggaaggcctacagcttaagctcccacctcaatcggcaccagaaagttcacactgcaggcaggctttaggagtgctttgaatacaacaggactcatcaatcagatgttgaatttcatgtatctgaacattgacacaaaggagataccttatggtgccaggtacgtgggaaccttctagggatatgttgcactttctgacttgctcaggttttttgccagagttatgtcactgtcaatccatgtggccgaaaccatcttaactctaccagctaagataccccagcattggggaaggcagggttttgtattgtccagtccctggagaaaatcatgaaatgcctgagttcattgggggtcctcattcccttctgtatgacaggtataggtatggatatgacccatttttagccaagagggtctgagctgtatctgctggtggcttatacaaaaagtttactttcttcatggatattcttggtctcacatacttgtaatcaagtttttccagcctccaagtcacctggcctgggaaagtacttgcctcatgttgctctggtttgtgataataaaggctttacagtttaagccacatttaatcttggggcttcttcttatggtctggggtggattgaaaacaggctctgccaaactgaagacagcctttgtgcggtgcctccaactttgcctcaaatgggacagtgggttgagggagaacagttcttagtccagttttgatgttaacttccatagctgacaaagcttgttaagtaagaattaagatcttgtgtagacctgatttgtctggattttagagttatttgagagcccatatttcaccttgaggagggtgctgctgctgtgacagcctgcagtgttttgaaacagcatggattgggtgtcttgtttgcagcatgtgtcccatgttccccaacactgttgagggaaagctgttcctcaggacctgctgagtggccatattccctgaaggcctgaatctgtttcacaggccactgttggtaagatctaaagcatccagtagggaaacaaaattgataaatattgagtgtgagtaattgggattggggagattgtggcaaactagaggggaagtgcccattgtaaaaacacatccacagacagtccaggcactaaggctgaatgggatcagggtatccagaaatctcaggatctccagggccatgttactgttaggtcaaggtcactggtgcagcaacgaatgtagtttttctagattcctctccctccctgggctctttacctaatgtctttgcggcacaggcggtaaccctgggagtaaagaggtgtggtccaaggaagtagcttttgtgaccagctggagtttctggtgactcttttggcaatggtcctcattgtttgccagtttttcttactactgaggaagagattgtcttcccaagatatttggagtgataagagtcaccatagtgaggtagagtcactcttagtgatgtccagttgtccagtttccaatagaagtgggagatccagatttttaaatgggataactttttataggttcactgaggtgtaatcaacatgcaatatattgcacatatttaaagtgtacgagttaagtcttgatacacacacacacacacacacacacacacacacacacacttgaaactatcaccctatcagtggtattggacatatctgttacccccaaagttaacctgaggcccttaacctttctctcagtgctcgccttcccccagaatccctaggcaaccactgagtagttttcactgtaggtaaatttgtcttttctagaattttatgtaagtctgcctataaagtgttaattttgcatgctgtctttcatgcaacataatttgaaatttgtccatggtatgtatgaacagtccattttaaaattactgagtcatattctgtatggatataccacagtttatccatttatcttaattgatgtctgtactccacccccatttttaaatattaaaaagctgctgcaaatattgatgcatgagtctttatgtggacacttagctgagaacatttttaagcagaggttttgaaggtgtgaccatatatcttactaattatagtaaaatatattggaaaagagatacatacagggaagaactgtgaaacagaaaagacctaagatttgatgatttgggaaattctcagcccatcttaattggaaaaaaaaaacaaaccattgaaattaagagattcattgttaggaaagatagatgttttagagagagagatgttttagagagatagccaaggatgtttgctgataccgggatcaaaacatacatcagaacactgtcacacaaaaagctctttgaagagattaaatgtgacttgtagatcccctcaatacaaacaatttataagaagtttaaactatcactcatctcagcaaaagccaaaaatatagataggggattccctaggaggaataatctgcataaacctcttttctaatgttgtgaatttcagtgatgtacaggagactcacaaaattcttgaaaattttataccagtggaaatgctcaccttgggtctaaagggaccttgaaagtatgaagttaaagggtgtaggcatgtaaagtgtgaagttaaaggttgtaatattctatacatgggactggctgcggaaacaggtgcaagcccttgctacctttcatgagaaaggaaggatgactcagagcagaggagagtccagtgggcagagtcctgaaccatgtgatattcccatgtcttgactcccagtggcatttgccaaactagatttcagattttcttgggattggtggttccattttttttgttttccccccttccatttcctccccttttgaaacaatgcatatacatataactattatcctaggtctttcccaaccttttgtttgggagcagataactagttttctagttttacagatccaaatgagacaggaatagcactgggtggtcacaggaggatggaaaatctcaacaccctggttttggtgcagctgaaaaaaaaaaagaaaaacccaaacaacagctaaaacgggaactaggcaaagaaaccgtgggataacagaaaacccaaaacaaaagagaaaactgccagaaccccagtcagggtgacatgtctgtaactcttccaggcaaacccaaataagggaggaggggtggtaatcaggggtccctgaaatcccctcttttcccagaatacctaatgattacccctattaaaggaacacccatacaattagaaacccaaactttgttttgcatgacttgctctcaggggcactcccacacttctctcttgtgtgtacttttgcttcacaataaaagctgcttgcctttgcttcactgtgactcgtcactgaattctttcaatggtgttaagaacctggatgctgctggggctgggatctcaccaacaatgtccagagacccccccgaaccccccagcaacacagagaagaattgtgccccaagatgggattatacctagagcctcatccatattggacttagacaatttagatgaaattggagactttagctcagtgtggaggcgcacacctgtagtcccagctgctcaggaggctaaggcaggagaatcgcttgaacccaggagacagaggtggcagtgagccaagattgcgccactgcactctagcctgggcaataaagcgagactgtctcaaaaaaaatcataaaatagtaaaaggcatcaaatttttgaggggaaatacctattggtgaactgaaaactcgacaacagttctggtgtgtgggataacatgttaatagccttgatcattttgaatttcataatcataaatgggattttgtttttgagatggggtttcactcttgttgcccaggctggagtgccatggcactatctcagctcactgcaacctctgcctcctgggttcaagcgattcttctgcctcagcctcctgagtagctgggattacaggcatgcaccaccacgcctggctcattttgtatttttagtagagacagggtttctccatgttggtcaggctggtcttgaacttctgacctcaggtgatccggctgccttgacctcccaaagtgccaggattacaggcatgagccactgtgcctggccttttgggattggtttaaagagctgtggaagacaattgagcaattaccacagagattagcaatggagttcctagtatatttgaaaatgaataaaattgttcctgggaaaattaacaatagtgatctcagtctaaattacagagtaagcaattcagagaggataatatgccacatatgcatagatttgtttaaaacagtaaattatatagcactgtaaaaattgaaaaaaatactattagaacaacaaacaattaggttgatgaagcacaataagagactaatgaaaaggaaagaaatgaaattacttaatatcaaaatgtatgaaataaatttaagccatatacaagcatgccaaattaacttgtgagattaacaaagagtgtattaattggggaaaaagactaggagtctgcaaatcctaagattaggcttaacactaagcctcttacaaacttcaagttttcaaaaaggctcaaggttttctggtacagaggtactatgggagcacagttcagatttaacttaacattacgttatttaggccaggcacggtggctcatgcctgtaatctcagcactttgggaggctgaggcgggcagatcacgaggtcaagagatggagaccatcatggctaccacagtgaaaccccatatctactaaaaatacaaaaaattagccgggtgtggtggcaggcgcctgtagtcccagctacccgggaggctgaggcaggagaatggcatgaacccgggaggcggagcttgtggtgagccgagatcacaccactgcactccagcctgggtgatagagcaagactccacctcaaaaaaaaaaaaaagaaagaaaattacagtctttaggaaactagatattcatcagagagtgtatgtgaccagaataagccatcttacgacgtctagatgacacagtaaatacttatgctgattcaaaattacctgagctacttcaacataggacatagcaaaacactgataattacattactgtatacttataaaagatgcttgtggctgggtgcagtggctcacacctataatcccagcccttcggaaggccaaggcaggcggatcatctgaggacaggagttccagaccagcctggccaacatggtgaaaccccatctctactaaaaatactaacattaggcaggagaattgcttgaatccgggaggcagaggttgcagtgagcagagattgcgccattactccagcctgggcggcgagagcaaaactccgtcaaaaaaacaaaaacaaaaaaaacaaaccatgctttcaaatctgcctaacaattatagcttcagagtccttgtattcaggattatctatttgtaacttactactttttacaaatatttttcttacactaaattagaaagaatgtttggtctcgcaggtgtctgagaatctttagtaaaatacccctacagattctattttggaatcatggttttaaaaaaagcaaaagtgtgtatttccaattaattgctacagagatgccaaatgtccactcagtagttgtgagtaaaacaaattgtcttattgctcttcacttcacaggcaaataaactcttcgagtgattgtgtgaagttcagagtattaggtcagggatgaaatggaggctaatccagacacgttataagagaaaatatggaatagagattctaggggcactaaagcaaatgcatgaggtggtctatgcttctgagtccctcatagtatgttccttctgagtatttgtattctaaacctcaaaattacaattttttgtataacatttcttactggattctccaagatataatctactttttgaagaatatgacatttatgtagaaatagtggttacttaccaaactggtatttgctactaggaaagtagcatcagtttttggcatgggcatctgaactctgagaataaggtttgggattccatgacctcatctccttgctgggaagtgatggtcattttattcttccacctgtaattgcagtgacagtgtctccaagaggattggagatgatctctgaaaaaaatttttgaagttagaaaattgtagaaagttattaacattaattactggagttatccatttagaatgacatcatacctaaaagagaaaattatctgtgaaatgggaacaaataaaggtaaatagaggaaacagttctaagacatgggacatgtaagttgaacccttggttatgctggaatcttggctcctatgaaatttttttttttttttttttttttttttttttgagatgtcttgctctgtcgcccaggctggagtgcaatggcgcgatctcggctcactgcaacctccgcctcccaggttcaaacaattcttcagcctcagcctctcaagtagctgggattacaggcgcccaccactgcacctggctaatttttgtatttttagtagcgatggggttttgctatgttggccaggctggttttgaactcctgacctcaggtgatccgcccgcctcggcctcccaaagtgctgggattacaggcgtgagccaccgcgcccagccgaaattcttatttctacaaagtctgacattttttcattcatatgaatggtgaggaataacaaacttggaaggaaagaaatagtaaaaagagagtgagagtacaaaggtgaaagagttgagggaaagcattactcaacatcttatctggttcagaggctcatctagatttgtatttacagcagtgaacaacctacaaagaaatgtattctcaagtaggctttattcaaattaagagatgtggtctggaaataataaagaaaatattggaaaatatacactaagttataaagagacagattctatggaaaatatcagaataccagcaccaagtaataacgaacacgtgaagtaggtagaatttctataggaaatttctatagtcagggttgtccttatagtggagataatatttgagcatatatttaaagcacagcagagagagagtgatttgtaaacacagagaaaatgtgctatggaaaagaaatagccagtacagtgtccaaaaagcctggaagtgaaaaatcatgtggtcaaagcacaattcaagagtgactggtgatggtttttataccatcaaaaatctccccaatgtgcacaattacccatgtatccattcacatgccattatctcagacctccttgtcaactgtcttctcaaacatattcttccttgcccttgatcacattgccaggtcatggactgctatcctgtaaaatacttgttctttggacacttattcctcctcataaaaaggtttacaaggtatgccacttgtgacttcacctatggggaaaattttgatccccaactatctttcaagaggatgcagaatatggctctgaggcagccacagttttgttttgtttttttttttttgaaatttatctttttttcccaccctgccttatggtgctgacacaatcttttttattactaggtttttaagagcacttttaggtttgcagtaaaattaaggggaaggtaaagagatattccatatactccctgcacctacataagcatagcgcccctcaccccaaccgcagtggcacatttgtagcaattataaacctacactgacacatcattatcatccaaagtccctactttactttagggttcactcttagtgttgtacattctatgtgtttggacaaaggtacaatgacacgtgtccactattagagtgtcatctaaaatagtaatcctctgtgctccacaaattcatccctcctacccttctaaacccccagcaaccactgatctttttactctttcatacttttaccttttctcaaatgtcattaattggaatcatacagtatattgccttttcagattggcctctttcatttagtggtatgcatacaaggtacctccatgttttttcacgtcttgaagattcatttaccttcagcattgagtaatgttccattgtctagatatactacagtttcttttctttctttgtttctttttttttttgagacggagtctcgctctgtcgcccaggctggagtgcagtggcgtgatctcggctcactgcaacctccgcctcccgggttcacgccactctcctgcctcagcctcccgaacagctgggactacaggtgcctgccaccatgcccagctaattttttttttttttttttttttttgtatttttagtagagacgggggtttcaccgtgttagccaggatggtctcgatctcctgacctcatgatccgcccacctcggcctcccaaagtgctgggattacagacgtgagccaccacgcctggcgatatactacagtttctaatccattcacttactgagggacatttttgttgcttccaaagtatgccaattttggataaaactgctatacacacacatgtacaggtttttgtgtggacataaattttccactcatatggataaattctgaaaaatatggttaccgtattgtatggtaaaagtgtgtttagttttgtaagaaaccaccaaactccatttcaaagtggctgtacaactttgcattcccgtcagcaatgagagctcctgttgctgtacattttctcaaccatttgcagttgtcagtgttacagaggttgttcattctaatagatgtgtagtggtatctcagtgctgttttaatttttacttccctgatgacatatgatggggattatcttttcatacacttatttgccatctgtgtatcttctctggtgaggtatctaaacctaaagtctttgcccatttcgttttttaattaagatgtttcttttttttcttttttttttttttgagacggagtctcacactgtcactaggctggagtgtcgtggcatgatctcggcttactgcaacctccacctcctgggttcaagcgattctcctgcctcagcctcccaagtagctgggactacaggcatgcgccaccacgcccaggtaatttttgtattttttagtagagacagggtttcaccatgttggccaggatggtcttgatctcttgaccttgtgatctgcctgcctcagcctcccaaagtgctgggattacaggcatgagccaccaagcccggccctgaaaaatttacacaattatacaaaacttacttaacctatgcttcattacctcatgaggagtactgggaagttttgagtacgtgcaatggatggaaacattgaatttggacataaagagttgtgtcctttttttttttttttttttggagtcttgctctgtcacccaggctggagtgcagtggtacgatctcgactcactgcaaccttcacttcccaggttcaagtgattctgattctcctgcctcggcctcccgagtaactgggattacaggtgccaccaccacgcccgactaattttggaatttttaatggagacggggtttcaccatgttggccaggctggtcttgaactcctgaccttaggtgattcgcccacctcggcctcccaaggtgggagcagcaatcacacctgctgggattacaggtgtgagccactgtgcccagccagttatgtcatttttcactagtttctcagttgattacctgaaagtatgaatttttaaagcacaataggattcagcagtctcaggtaggaaaaaggtaacctggaaagatccctgcatgtgaatgcacacacagctttcagggatctgaggaaattcagcatgtgtaggatatagaggagatacatggtaggaggtgaagcaatatgtaatggttggttctgtaatataggcccagccaagaactctaacctttttcctaaaaacaatgacaagcccattgtgagatctaaccagatgtacaatagtagtcattccacttataaatttttgtagtaaatgtgtaaacaaatacattatatatttgataaaatcatttcacaacttttaattttattttattttactggtattaatttgtcctaaaggatcatttttattgtgaaacgtaaaatttgatctatctaatatatataaaatgtatatgtgtacatttaacaatgtgcatatatgtaccttaaaataatataaactttctgggcgacggagtgaggccctgtttaaaataatgataataatttgatattttatgcattaaaaacttttgtctgggcatggtgactcatgcttgtaatctcagcagtttgggaggctgaggcaagaagattgcatggccctaggagtttgagactagcctgggccctatagggagactccattcctacaataattttttttttaactagccgggtgtggtggtgtgcttgtagtgccagctactcaagaggctgaggtgggaggatcacttgagcccaggaagtggaggctgcaatgagctatgattgttccactgtactccagcctggacaacagagtgagaccctgtctcaaaaaaaaattaaatgttttgattatacaaggaaaatgaacattcatgtattaaagcttcatgttttatgaacaaaactgactttgcaggcaggagagcgttttctgggggcaccagaagcagggaacttcccttgtccgttggcttcagggctgcccactatccctccactatcttcccattgtagccctgtctggtgtcttttgtccctgacaaaacctacaaaaagtgactttaacacttcaggctgcatgcatttgaagagcaataagataacgttttttcgcttcccactaccagtggagatctgctggggtgggctgcatggaatctgaaatgatgtctaaatactgaagtgaacctctacactagagactgatatacagctgacccttaaacgacgcaggggtcagggataccgacccctgcggaattgaaaatgcttgtattacttttgactcccctaggtcttaactactaatagccaactgttgcccggaagccttatgaagttgcccggaagccttatgaattacataaactcccagtcgattaacacattttgtatgatatatgcatgatatatgcataatatatatgatatatgcattttgtatgatatatgcattatatatattttagtataagaactatacttgtactaaaacagaccagagaaagggtatcaggaaaattgtaagaggctcgttgacattacacccaattaaaaaaaggaaaataaaagaatacggaagggaaaatacatttactaatcattaagtggaagtggatcatcataaaggtcttcatccttgtgttcttcatgctgggcaagagaatgaggtcttgctgtctctggggcaagaggtcggggagctggaagaggcaggaaaaggagcacactcgaagtaacgtttattggggaaaaaaaacgcctacgtgtaaatggacccgcacagctcaaacctgtgttgttcaagtgtcaacctacttaagacctcaaacaccgaagcccctcagtcgccctggaaggcagcagacgcagcttcctagcgctcccagctgtctgcacacaaggcgccctccgtcgcagcctgggggagactacattacccagaaagccttgcgtcgagcggcagtactttgatccaatgaaaatccaagacaggggcatttccgtgtgggtctacccccgccccccccagggcgggacttgtggcgtcttcgcagcggtcattttggctgccctcccggaggtccgttctgtctgtcagccgctttggtacgctgcatcgggatcgaagtgacggaccgtgaaggcgcgagagtcaggtctgagggtcgggggcagagccgcccgcgaggccggcctggggatagcgatgctcgggttccccccgggtcgcccgcagctcccggtccagctccgcccacagactcggatggcgaccgcactgagggacccggcttcggtgagcgctgcgatctccgggcctcccccggccgagattcttaagtcccaagtgagaggcaccagctcacgtctctgtagcacagggtcggggacactgaggctcgtgggtggggcccctatttctgacatccgatgtggtgggcagggggacaagggacaggaccggcgcgtgcagggcttggacgggcaaccgagaagggggcattcaggaacctgggctccacattgttactgcagggaacaaagtttgagagagatctacctttattcttagggccgtgggagccatagagagcttgcgcaaacgagagacaccatctgagttaaatttgaaaaatcctctgcaggctgttcagtggaagaaaagactttagagatggatgaggacgttgaggcagagggaggttgaatatttttccaaggccacacaactggtgagaggcagcactaaggaccgaggcgcacaggttagacagtcgacccaaagttacgtggctctgggccggggcaagggtacagggaaggcctgtgcccatggagcactgccatgatcacattcctctgaggcctgcgtctttccacaggttcccatagctacagaggtgcttttcaaacttacacaggtaagtggaggtatctcagcccctcactggtctggaatgtccctccaccctccccagacagatattttctttagatttgtggtgtcatgggactcacctaccattctctcagcgtttggtttgggaaccctggagaatccctgagctaagggccctgagtccaggccaatgtttccatttggagcagccaatggaaagatgggtgaaaatttatgatagaaacaggtaggtaccagcttttggaactccttggaggtgaggctgagctggttcagggaactgcaggtttcctttatttctgtgaagtttggcatctattgtgaggaagttggagtttgggatcagaggagggagatttatctaacccaagtgttgacaggatacagagtggaaaacagaatgaacacagtgactaatgggaatgtgaagagacagcagggatcaatgacaccaaggtctggtgtctcttctgacttggggatcttgggaggagaatgtatggggacatggattttgagtcttccaaattgagactgttcatggtttcatcaatccctattatgctagggaagtgtgacctttgaagatgtggccgtgtacttctcctgggaggaatgggatctccttgatgaggctcagaaacacctgtacttcgatgtgatgctggagaactttgcacttacgtcctccctgggtaaggccctcatactcacccttgtgccctggactaggctctctgtttctccttttcctcaggagcagctctgtcctcatatctggactataggcactgcctccttccccagttccctgggtagatgttgtggactgagtgcaagcctacttcccttatcgtcccagcccaaaagcatcttgggtaaggatttgggatcagtagtcttacagtaagcctaatagatcccacctgacttgccttctccctgtctggtgactttctagatctatggcacccagttttccctcccttcgtgtacctaacatttatttgtgctagactgtgacatgaaatgtagtcactgacattgccactatttacacagactgttcttcaaccaccaacctttccattaacagcagaacactctaacaaattgtgccgcagagacattacacagactgttcttatagaaacctccttcaaggtgtttttctttgtttttaattgtaaaatatatataacaaaatttaccattttaatcattttcaagtatatagttcagcgcatttagtacattcgcattattgtgcaaccatcaccaccatccttctatagtactttttcatcttataaaactgaaactttgtactcattaaataataactcttcccatcccctggcaaccaccattttacttttggtctgtatgaatttgtctactgtaagtacctcatatgagtgggatcacacaatatttgttcttttctatctggcttacttcacttagcataatatcttcaagattcatccatgttgtaatatatatcagaattgcttctttttaaggctgaataatattcttttgtatgtattacagtttgtttatccattccttcatcagtggacacaggttgttttcaccttctggctgttgtgaataatattactgtgaacatgggtgtacagatacgtatttgtgtccttgctttcaattcttttgggtattggcccaaaagtagaatttctggatcataaggtaattatttttaatttttaaggaaccactaaaattgtttttcatagcagctgcaccattttacattcccacaagcagctgacaaaggttccagtttcttcacaccctcaccatcacttgttattttctgatttttttgataagtcatccaaattggtgtgaggtgatatctcactgtggttgtgatttgcagattactgatattgagcatctattcatgtgctgattggctatttgtatatcttcaaatgatattgcttattcaagtcctttgcctatttttaaattaggttttattaattataattagaagtattaaatataattttttattgagctttaagggttatctgtgtgttctagatattcccttatcagatatgtgatttgcaaatgttttctcttattctgtgggttacgtttttagtgtgttgataggatcctttgatgtacaagtttctcattttgatgaattcagttttacttttttacttttattgtctatgctttttatatcatatccaaggaatcattaacaagtccaatgtcatgaagctttttccttgctttaagacttctatagttttagtacttacattcagatctttgatctgttttgaattaatttttatatgtggtgtcaggtaagggaccaacttcattctttcacatgtagatatccagttttcctagcatcatgtgttaaaaatttgtcttctttctcctggtcaaaaatcatttggccagatatttgagggtttatttctggggtctcttctagtccattgatctatatgtctttctttatgggagtaccacactgttttaatttctatagccttgcagtaagttttgaaattacgaactgtgagtcttccaactttcatccttttcaagattgttttagctattctgtgtctctcgatatttcaaatgaattttaggatggatttttttatttctgcaaaataacgtcatttggattttgataggtatcgcactttctatagattactttggctagtatagacatcttaacaatattgagcactctagtccatgagcaggcatgtgatctattttattaatgttttatttaattcattttagcaaaattttgtagtttctagtgtacaaggcttttacttgtttggttaagttaatctttaatgttttattctttttgatataagtggaattgtttacttttcaaattgttcaccattagtgtatagaaacgtaactgatttttgcatgttgtatttatattctcctatttgctgaatttccttattagttgtaacagtttttcagtggaatctttatggtattccatgtatatcatctgtgagcagggataattttactcctcctttcccattttggtcccttttctttctttttcttgcctaattgctatgttgaacagaagtgctaaaagtagcatccttatcttgtccttaatcttagaggaaaatctttcagtctttcattgttgagtataattttagctgtaggtttttttttttgcatatggattttattatgtttaggtaatttccctgtattcctggttttctgagtgttttccccacgaaaaagtgttgcatattgtctaatgctttcagtgcatcagctgagatgatcgttttaatttttttagagatggggtcttgctatgttacacaggctggtcttaagctcctggccgcaagcgatcctcctgcctcagcctaccaagtagctgggattacaggtgtaagccaccactttgatcagtttttgtttgttgaaccatccttgcattccaggaataaattctatctggtcgtagtgcataatccttttaatatgctgttgaattcagtttgctagtgtttggttgatggtttttgcattaataatcatcaaggatattggtctgtagttttattttcttacacaatctttgtgtcatttggaatcagggtaatgctggccatacagaatgagtttagatgtgtgtatgctacagttttttgagagaatttgaaaaggataagtattagttcttagttaaatggttggtagaattcatctgtgaagccatcaagtcaagggcttttctttaaggtttgtcttttttttttttttttttcttgagacagagtattgctctgacacccaggctagagtgcagtggtgtgatcttggctcactgcaacctccacttcctggattcaagcaattctcctgccttggcctcccgattagctggggttacaggcacatgccaccacacctggctaatttttgtattcttagtagagatggggtttcaccatgttggccaggctggtcttgaactcctgacctcaggtgatccacccacctcagcttcccaaagtgctggaattacaggcatgagccactgcacccggccaggtttgtcaattttgataaccttttcaaagaaacaccttttggttttgttgattttttttttatattgtttttctcttctctattttatttatctagactttagtctttattatttttttcctgccagctttggttttagtttgttcctctttttataatcccttaagttgtaaaaatagattgttgagttgagatctttcttctttttaatgtttatagctataaatttcccctttagtactgcttttactgcatctccaatttatttcccttctgatttcttcatggccccattggtttttcaatattgtattaatttctacagatttgtaaattttttagtttccttctattaagagttcccaacctcatcccactgtggttggagaagatactttgtatgatgtgtgtctaaatcaaatgaggcttaatttatggtctgtcctggagaatgtttttggtacacatgaggggaatgtacattctgttgttgttgggtagaatgctctttatatatttgttagagctagttggttgtttaggtcctctgttttctctcttctctctgattgttctatccgctgctgagagtcaggtattgatgtctctaactgttattgtagaactatccatttctcccttcagttctgtccatttttgcctcatgtgttttgatggtctattattaggtgcataagtgtttataagtgttatatcttcttgctctactgaaccttttattagtatataatatccttttatatctcttgttaccctttttgatttaaaatctctattgtatgatattaatgtagccattcttactcttttttgcttgctatttgcatggaatatctttttgtaggctgtcactttcacctcatttacatctttggatctaaagcaaatctcttgtagacatcataaagttggatcatgggttgtttttattttaacccattctgccaatctttgtcttttggcagagtttaagctaaaagttgggagcatttaaggcatttacgtttaaggtaatcactgataaggaagggcagacttctatcattttgctctttgttttccccatgtcttatagccttatagcttttttgatcctaatttcctgcattactgcttcttttgtgtttggctcacttttttttttttttttttttagtgaaacttcccttgtcatttcctttatgtactttttttttttttttttttttttttttttttaatggtgtctcactctgttgcccaggctggagtgcagtggggcgatctcggctcactgcaacctctgcctcccataatcaagcgattatcctgcctcagcctcctgagtaatccctcctgggattacaaacgcacaccaccacacccagctaatttttgtatttttagtagagacagggtttcaccatgttggccatactggtcccaaactcctgacctcagttgatccacccacctcagcctcccaaagtgctgagattacaggtgtgagccaccacgcccagttctttgtatacttcatgtagctctttttttaaaatagttaccatggggattacatttaacatcctaaagttacaacactctaacttgaatttatacaaacttaacttctttaactttccttgttcttttttgtgccgtgttgttctgggccagtgttagttgctcacatgtcctgtctttcccttaggacttatatcatcctggtctcatgtagttgctcaactagggctaggggaagtgccctctgttcttcacaggatgttcatgactccagcctcagcaagatgggatcagagagggcctggcctacatgaatggcacttgggaaaaggcatgtcatcaggtctgtgtttaaattgcaccaggaacctgtcctgtttgacttgtcttgatgccattgccagagacacttcacttcgaccttcccctcttcactcttaacagtttacaaacttgttatttctactacttgtcatttttattttgacttctagctaacgctaatcctcacctctctggactccttatcctacctgttcttttcactgttccctctgtagtgttctttaatattattttgtcctgaagtgtgcatatctcccttaatagtccctgaacaccagttactgttccagtgagattttcctgggcctgggcatacacttcacagcatcacttgtcaccagcagatgtgatcccactaaaagctattatcagaagaattaattgtataacatgcctcttagtcctgggccataccttagccttgtgcactgtacctgggagggcctaccctattccgtaaccttagggacaagtaatgcacaacagctgcttcctcaacctgaccccccaactcacttttcctaaaaacaggcccatatactggttctttgctgtaactgatgtgcatttgcaattgcattgtctcctcctaataaaggtaacatgtacttcaccatgatctctttacttttaggttgttggtgtggagtggaacatgaggaaacaccttctgaacagagaatttctggagaaagagtgccacagttcaggacttccaaagaaggttcatcttcccagaatgccgactcctgtgaaatatgttgcctggtcttgagagatattttgcacttggctgaacaccaaggaacaaactgcgggcagaaactacacacatgtggaaaacaattctacatcagtgcaaatcttcaacagcaccagaggcagcacattacagaggcacctttcagaagttatgtggacactgcctcgtttacacagagttgcatagtccatgtgtcggagaaaccctttacctgcagggagatcaggaaagacttcctggccaacatgaggtttctccatcaagacgccactcaaacaggggagaagccaaataacagtaacaagtgtgcggtggccttttacagtggaaaaagtcatcacaactggggaaaatgcagtaaagcctttagccacatagacacacttgttcaggaccagagaatcctcactagagaaggactttttgagtgcagtaaatgtgggaaagcatgtacgcgaagatgtaacctcattcagcaccagaaagtccacagtgaagaaaggccttatgaatgcaatgaatgtggaaaattctttacctactactccagtttcattatacatcagagagttcatactggagaaaggccttatgcgtgccctgaatgtgggaaatcgtttagtcagatatacagcctcaatagccataggaaagttcacactggagaaaggccttatgaatgtggggaatgtgggaaatcttttagccaaaggtccaacctcatgcagcatcgcagagttcacactggagaaaggccttatgaatgcagcgaatgtgggaaatcttttagccaaaactttagcctgatctaccaccagagagttcacactggagaaagacctcatgagtgcaatgaatgtggaaaatcctttagccgaagctccagcctcattcaccaccggagacttcacactggagaaagaccctatgagtgcagtaaatgtgggaagtcatttaagcaaagctccagcttcagttcacatcggaaagtccacacaggggaaaggccttatgtgtgtggggaatgtgggaaatcctttagccatagctccaaccttaagaaccaccagagagttcacactggagaaagacctgttgagtgcagtgaatgtagcaaatcctttagctgtaaatctaacctcattaaacacctgagagttcacactggagaaaggccttatgagtgcagtgaatgtgggaaatcctttagccaaagttctagcctcattcaacaccgcagagttcacacgggaaaaaggccttatcagtgcagtcaatgtgggaaatcctttggctgcaaatctgtcctcattcaacaccagagagttcacattggagaaaagccttagctgtactgagaatatgcaatttccttttagtgtaattatactgaaggagtacacctgtgagagagacaagtacctgatttggaagccccaacatctaaggatatacagtgggcggattccccttaagttccaggtatgtgttacactttctaacatgccatttagaaagtgttagactttctcacctgccatttatggctcttgccgtttatgtcactgacagtttctgaggcagaagccgtatcatgtctaccacctgtgaggtccacacagtgtgtatcatttacctcctgaacctgctcaaggaagcagacctctgcttctccccatttgctagaagaaatcatgaatagtctgagtcttcctctctgacaagttagggcatggacttgacccagctttgtgccagagaacccaatatgagtgttgttggcagcttgccaagaaggactgtctttttcaagacatactggtttcatgtgacacctccatggatttttttccagcctctaagtcaccaacttgggaactgcttgtctcacgttgctttgttttttacaataataaaagcattattatttaagctacctttatcttggcatttgattcactctttgaggtggttcaaaaacagaatcgggccctgccagctttacagagtaaacacctttggagggagagggaggtgtcatatgcctcagtgacaacagtataatggaaaaatacaactgtctttccagctttggcctaatctgaatttgaattattgcccaaggccttctaggaaatactgcaggatattatggtcttaattcgtggactggatgcaaggattttttgtgggctcaaaggacaccctgaggaagtgggaaattgtgacaaattccattgcttctgggaacaagatgaattttgttgttattcacaagggttattacatactgcccagcactgttgaggcagtctacccccagtgctgccaaggagccaagtgccccaatacaatttagtaggctactgtcactgtaaaatgatgggggaaccataattggtgtggaaacactgggttactagggagtgaaggagactgcagcaaactagatggaatgtgctccttgtaatatgttctagtaattgtgcaggatcagtgtgtacagacattcttagaatttccaggcatgtgtattttttgtagctgaggtgactgtcaaaaaataataaacaacctaaaggttttgtgtattccaatagcctttctgggatgtgcacctcaagaacattgctgcataggccaggaaaacaagcatagaaagaaggggcgggggatgtccttccaggaatgtgactttgtaacctaccatcatcctgtgtttaaatgaattcaaatcagtttcattgattaccagtatttgctgcccactgaggcaaggtgtccctccaaggtcatcaggaaagagagttaatgtagggttaccaaacctagtcaaaaacacattataccatcattataattattacaatgaacatatcagtcacctcggatttacctcaggcctttttctaagctctccctcccctctctggccctcaaggcaaccattgatttataccttcatttataataggtttgtttgtattttctataatatatgattttattaataaaatgtctttttttccagtttcattcatgatgcataattattttgagattcttcaatggagcttatatgtggtggtcattctttttattgctgagtggtatattttttatggatatactatttgttatccatttgtttataagcatttaggttttatctagttttggctattacaaataaagctgctagaaatgtacaattcttcatatgtgcatttttttcacttctcttgtgcaatgcctgagacacaggataaatgaatgtttaacttattaagaaatggccaaaaatgggctgggtgcggtggctcacgcctatactcccagcactttgggaggccgaggcaggcagatcacgaggtcaacagatcgaaaccatcttggccaacatggtgaaaccccatctgtactaaaaatacaaaacttagctgggcgtggtggtgcgtgcctgtagtcccagctgcttgggaggctgaggcaggagaataacttgaacccagaaggcggaggttgcagtgagccgaggtcacaccactgcactccagcctggcaacaaagtgagactctatctcaaaaaaaaaaaaaagaaaagataaatggccaaattgatctaaaatggctgtttgctcttgcttacctactgggaatgtgtgagaattccagctgtttcacatccttgccaatacttggcatggtctatcttttagaatgtacccttttaataagtgtgcagtagttttaattgcatttccctaaggattcatgatgttgaacattttttcatgtgtttatttgccaaatgtatatcttcttttttacacttttttttttttcttttagacggagtcttgctctgtcacccaggctggagtgcagtggcgtgatctcggctcactgcaagctccgcctcccaggttcacaccattctcctgcctcagcctcctgagtagctgggactacaggtgcctgccaccatgcccggctaattttttttttttttttgtattttttagttgagatggggtttcaccatgttagccaggattgtctcgatctcctgacctcgtgatccgcccgcctcggcctcccaaagtgctgggattacaggcgtgagccactgcacccagcctgccaactgtatatcttctttgataaaatgtctgttcatatacgttatctgtttgttaggaattgtgtctattttgcttttcattaacaaatcactagtttttgttccacaattaatttcatgctatgcacagtgtaattaccatatataccacacacttttaaatttaatctgtattattcacatattctctatcacattcttaagtctagacacttagtagtacagtgaatcaagctatggtttatagtgatgccagtttccctggtgtaaaacttcccattgtggccaatttcaaactgtcatcatgtcactgaatttggggttgggaagagccatcagaaacataccatttccataatagtgatccatatttaaatttacttctaaataaatttatttgcaagtttactacctgcaaatagcctctagaatgtagacaataaaacatagtaaaatgattaggaagtgacaaattttgaatatttgttttttaaaaaatataaaagaggtataattgacaatgcaaactgcacatatttttaaatgtacattttgatattttgatacacgcttatacccttaaaatcaaaaatttcattgaaaacaagtgaaaagacaatctgtaatactgttaacagttaacagttaagttattctgttaaatacatcagttgtccaaaaaacaaagtaggcaacatatttgaaatacaggcagttcttgctctattcatcttcatgaactgaaaatgccttgacaaaacatgagaaagaatggaagttaacaattgagatgaaatttgccaacatttattttggaatcaaagtctattttcattatgaatcctctgggattttgtaacataaagttttctagtgcaaatacattgggatttattaggatttactgataaagaactctcagtcacattttagttgtccatattatatatttggtacattctgtgataacggaaagtacaaatagcactaatgttttggggaagaaaatagctacttgttgcctccttcccacagaaccagggctagataatgaggagcacatctcactaactgatcacacagctgtctgtagacatttggccaggaagagcactgtgggatgaatcaaacaaccaggaaatcaggtggaggagaatcagaagagatgctactgtttgttttcaagtaaatcaggctatctccagaaggatcatcaatcatagataagtgtttacttctagtgttacacaggtagaacagaaagtatgttaaatttatatgtatttgaaagaaaaatttaagcatgaagtaaaaactgaaggaacattctagaaaagttttagtacacaaaataagagaatgtaattaaacggtatttcactgtagatttctgctactttggtctcacccattaaatcccctatacctcacatagttgacatgaacaaagccattcattattccactggcaaatactttcctgttatatatgttctattcattacctattccaacagcctctcatacacattcaccttcgaaggtgatttcaacagttctcagctgggcgcagtggctcacgcctgtaatcccagcactttgggaggccgaggtgggcagatcacttgaggtgcacatcatctggtgtgcttagcattactccatttctgatactgttagaaggcaacttctaactttgtcagctccaaccaatcccaagctggccaagcacctattgggtctcttttgctcctggaggcaacatagtctccatttacaaataccactcaggcctatttattcacccatccacaaaacagcccacttttggaggcctttacaacagaaggccctagagtcagttcagatgaccatataacagacatttcctttagtgcctcctggagattccttcatggtggactacccactagactctcttcttagactctggaccacacatctggccataagctgcccatgggcttctggtgcaaaaaactgcctgttttgtcctcatgtaacatgcaattagagcaacaactgccagctacatactgggacctcttagaaacagaagctctcacaggacctgaaccatggcacactccacccagttacacattattacctgggtcatgaaagcaacacctacaagctcagcctgatcaccaaggccttgatacaggatggagccaaacctgggccccctggtgtatctcacttggaaaaagaggtggccttctctgtcctcagtctcttgccagatgccatggtgaaggaagtctcctctctcctgggcccttggcagccctggaatcaagtaagtaaacaacaaggggagaacacatactttgttgacagtaatgccaccactacatgagctggagctctctggaggtctgctgcttttcttctaaacaagacacactgctgaaggatgggaactgcaggcagtcattttagcgctggaggctaccttggccaagaaattacctcaattacacttctagtcatttggtgcaaccaatggcaacaatttctcgttcaagatcatactcttggggtaaacaacttcaggaatttcttgcctctcagatatcaaagatataaattaagatcatgtatgtctccgcccacaccaaggctcagactgctgaagcctaacttaattcccaagctggtagattacaacaattttcaaaaactaggaccaaaactttgttggatgaccttccaggcccattcctttatttttggcccaataggcccatgaaacaacagtcatagaggaacctctatgaggaacccaatcttgaagactggggctaaacacaaagtgtttccccacccctctaccatggccaacatgatgacgggtcagtgcactctgtgggaatacctgtcattggcaagacaactgaggtgtgctattctggatcccacttttagtcatgtggcaggtagattttaccaggccactgcctctgtctaccagtgccacttgttatgctttgactgtggttgatgcctaccgccgacatcttactttaccccactagacatggcactgctgaagctactatacagcaccacaaaacgctcctattccctttggagttcccgacaacagcggtgaacaaagctctcattttagacaaagcatttgagagaacttgcgacattccaatcagtcccaggctgctggttttatagaatgccacaatggcttacttaaaacttagtagaaattatgaaatagcatatggtcttatagatgggtctttttcctgccattagaccttattatactaaattcccagctctattccctgccaaaatgcactgaaaacatctccattagatttcattgccctctgtggtgacacttcacataacagagcttacaaagatcatattgaactaggcattcctcctgttcttcctctttctgctatcacttttcagtccccatcctgactggaaagaaagacagactgagggtggattgtgagttatgatcctcatgaatgaatgcccctttggcttcctgccagagccatctggcaccctgctaacgttgagtcgcctaaggcaggagttttgccaaatattcttggttataaaggatacttaattacaaatgcccataatgatctcactcaggaaagagaaatcatggctccaagacccacaaccacaccgtgtcaataacaggccagcaaagaccaaaactgaatttgtctaacagcatcctccactaaggaacgcaggctccccctacctcattggcagttttgtacacctgtgtgtgtgtgcgccgtaggctccctttcaactgcctcaccatgtcacagcttattcagctgactgtaagccttaccatggcactctccacacactctccacacataatctatttggctggtcacacctcaaacctaaacttgttctcctggacttctcttaaaaatgccaactccagttattcaagatgacccactattatgtctgaccaaaatgttcactggcaataattcataccaaataccaagtccaagactttagcccctgagaacttattggttgtatttcccgaaatacccctcgcttctgaagttattgagtccttaatctcagacttctcttaatttgacttgcactatgtgcattttggggccaaatataaccttttgttatcctgccaaaaaaagttctgtattttgattgtgatggtgattacatgtatctccacacgtgataaaattgcatagaactggccagaagtggtggctcatgcctgtaatcccagcactttgggaggccaaggctggcagatcacgaggtcaggagtttgagaccagcctggttaacacagcgaaaccctgtctctactaaatatacaaaaattagctgggcatggccgggcccagtggctcacgcctgtaatcccagcactttgggaggctgaggcgggtggatcacgaggccagtagatcaagaccatcctggctatcacggtgaaaccccatctctactaaaaatacaaaaaattagccgggtatggtggcgggcgcctgtagtcccagctactcaggaggctgaggcaggagaatggtgtgaacccaggaggcagagcttgcagtaagctgagatcatgccactgcactccagcctgggtgacagagcgacactctgtctcaaaaaaaaaattagccaggcatggtggcgcgcacttgtagtcccagctactcaggaggctgaggcaggagaatcgcttgaacccaggaaatgcaggttgcagtgagccaagatcaccccatggcactccagcctgggtgacagagcgagactctgtctcaaaaaaaaaaaaaaaaaaagcatagaactacacacatacaacgagtgtataaaatggtgagctctgaaagaggtctgaggattgaaccaatgtcgcattcctggttttggtaatgtactaaggttatataagatgttactattggggaaagtaggtgaaaggtactctgcactattgatatggtttggatatctgtcctgcccaaacctcatgttgaaatgtaatctccaatgttggaggtggggcctggcaggaggtgattggctcatgagggtggtttcccctgaatggtttagcaccaccctttggtgctgtcctcacgatagtgagttatcatgagatctggctgtttgaaagtgtgtggcacctccaacttcgctcttgctcctgatcccacaactacatttgcaacatcctgcatatctgtacttcaaaataaattcttaaaaatttttcactgttccgtatatttccacagtgtatatagttcactgttctgtatatttctacatcagaatgtataattttcggccgggtgtggtggttcacgcctgtaatcccagcactttgggaggccgaggtgggtggatcacctgaggtcaggagttcgagaccaaactgaccagcatggtgaaaccccctctctaccaaaaatacaaaaattagctgggtgtggtggcgggcacctgtaatcccagctactcagaagggttaggttactcaccactatactaatgaggatgaagcctctttttttttttttttttgagatggagtcttgctcttgttgcccaggctggaatgcagtggtgcgatctcgactcactgcaacctctgcctcctgggttcaagcgattctcctgcctcagcctcctgagtaactgggattacaggcgcctgccaccacccctggctaatttttgtacttttagtagagacaaggttttgctatgttggccaggctggtctcgaactcctggcctcaggtgatctgcccccctcggcctcccaaagtgctgggattactagtgtgagccacgatgcccagccaaagtctcttttttataagggccttaatcatactcttaagggaggagctgtcataacaacctaatcaccttctaaaggccctatctcttaatctcataataccattgcattagaaattaagttttaacatgaatttccaccagcctcaggggctcacaccggtaatcccaccactttgagaggcagaggcgagtggatcacttaagcccagcctggccaacatggtgaaaccctgtctctactaaaaatacaaaaattagccaggcatggtggcagacacctgtaattccagctgcctatgaggctgagatgggagaatcacttgaacctgggaggtggaggttgcagtgagctaagatcacaccactgtactccagccagggggacagagtgagactccatctcaataaataaataaataaagataatgttagcccaaacggtgccatttcataaaccctggacagagtggaaaattccactaggtctttggctgtgagaaacatcctgccagacgagtcccaagcctaaccacctgactgcaggaaatccctcccttatcagcagctaaccacaacgccccaccccagtctacaacaagcccagacctctcccgcctagacctataattaccccaatctgtaagcaggggtggactccagcgctagctggtgtccccgtctacaggcctttgttcaataaacctgtgttgccatagagccatctccattccgttccttctcccttccttgctctcagttctgaaacccgggacgacgcttgggttcacttggaggaatccctttttgcaacctgggaagcagtgagcagcggcagctcatcccaggtgaattcccagatcctaattagacccttcactcccagccccgtcttcctaccactttcccttttctctccttcttccactaggaggctccagcaaggatcactccaattactggacatcatatccaacaccagtctccgatttctgggtgagttccccctttccccctctggattcctctcatatttccagaaaagcccagtgccaggtgagagaactccccagtcaccactgggtaaccctgacctgccttctcaggggatgtcctcagaatgctcactgctccaacccccaagggactgtgaaaagcttcagggatgccccagctcttctccatccctcctcatgattggaatcaggatactcaccaccccacacacctatctcaccctcctggccaccaatatggggcagggctcctaaaaaccccctcaagacacccctctcagatactcatccagaacctcaaaaccctgggcttggtgcactccattaaaaccaaatgccttattttcctttgtaatgtggcttggccccaatataagctggacaatgatagttgatggccggaaaacaggacattgaacttccaaattcaacgtgatctaaaaagctttctccaatgcaatggtaaatcgtccggggtgccctatattcaggcctttgtttatctctgtttgtggtcctctctctgtcaatcctgttcaccctttcaaatcctcctcttcaacaaaagacccacgaaaacacctcctctttcggacaagccttcctcctccgattttgacccagtcgatgaacctctgcccttgaacccctcctcaccaccatatcctcctccttctcctttggttccatctccccctctggctcctccacccccttaccatcatcctccattctcccttctttctccactgcatacacagtcctgtgcctaacaccctcccgctgaaggccatgcccacatccaaaaccctttcagagtccttcccttgtgggagacggcaggggctgaaggcatagtctgagtccatgttcccttttccctagctgacctcttccaaattgaaaagagactcagctctttttccacagaccctgcctccttctgtaagagatttttgtacatcactcaatcttatgacctaatctggcatgacctttatgtcatcctctcctcccctcttacccctgaggacaggggacatgtctggacagctgctcaggctcacactgatgctctccaccaccaagatgcagctcataacccagttggggccttcgttgtccccagaactgatcccagtgggattatcagccaacttccccagacaggtaaaggcaagatcataagataacatgcctcctggcaggcatgaataaagccactcttaaggtagtcaactatgaaaagataaaggaaattattcaaggccttgatgaaaatcctgctcttaaccagcctgatcaacatggtgaaaccctgcctctactaaaaaattagccgggcatggtggtacgcctctgtaatcccagccactcaggaggctgaggcaggagaatcacttgaacctggtaggtggaggttgcagtgagctgagatcactccactgcaatccagcctgggtgacagagcgagactccatctcaaagaaaaaaaaaaaaaaaaaggaaagaaaatcctgctctttttctttctcgcctttcagaagccatgattaaatacaccacctaaagccctcaggccaacaagggcagaatctatctccacttacatttcatttcccagtcaacccctgatattcagaaaaaaactccaaagactggaagatggccctcaaaatctccagagacttaatcaaagtggccttcaaagtctttaacaatagggaggaagaaccgaaaacccaaaagttcaaaaggtactaggctaaataccaggtgctggcagatgccatacaacagggttcccaatgcatacaaaaatcctcaacctcaggacagccctcaccaggagcctgttttaagtgcagccaacagggtcattgggcaaaagcctgccctaatcccaggctgccctcaaaaccttgccccatctgtggtatcaagggacactggaagtcagactgtgctcagcaagacgcttcatcctgcttgaccacctctaactcaaacaggtcccccattccagatcccagtctggcaagcattcttggcctggccactgaagactgacaggatcacccactaccatcaccaccttagaacgcagggtaacactgtcagtctctggtaagctcatgtctttcctgttggatactgggcaacatactcagttctaccagaatattctggacctctcctcagttcttccatcactattttaggagttgatggaataccctctaaacataaacagactggccccctattatgtaacctagtcaacacttgcttcacccactcattcctggtcatccctcaatgtcccacccctattttgggactgaatatattaatcaattccagttttccatagaatttaccccctgtcattctaccccttttattttactctgtcaactggacacttccctctcctctccctcatcttccttatccaatttgctagcctctgtcaaccccaaggtttgcgatgtttccaagccaacaatagcagcataccacaccccagacaaaataacctttcaaaacccttctacattcctttgtcagcccagtacctccttagcccagctggcctcagagacctcaaactcattcgttggaaattcctgcaagcccaaattctcaagcctgttaaatctctccacaacacccctatcctggccatctggaaagctgatgggtccaactacctggattttttatttattaaccaggcagtggtgcccatccatctggtggcccccaatccctacactttactttcccatatccccccacctccaccactcatttatctgtattggacttgaaggacaccttttttcaccatccccttggatccagcctcccaaagcctttttgctttcacctggacagatcctgatactcacacatccgcacagctaacatggactatattcccacaggggggctggaatagcccctgcttatttggacaggccctcaccagggacctggctaaacttccccttgctcctagcaccctcctccaatacatcaataacacccttctctgtagcccctcccttaacctatctatccatccaacacatcattcagcttctaaactttctccattcttggggatattaggtctcactcacaaaggctcaagtaacccaaccccaggttacctaccttggacttatcctaatccctaatattcaggccataccaacccaatggaagaagctaatccgggatatgcccctttctcatacaaagaacctcctttccttcttgagccttgtgggatacttctggctatggattcccaacttgctgaccaagctgctgtacaccacatcacgtgggcccatcctagaacacctggatccagtctgtaccattgactcccagttcaaaaaactgaaaaatgccctttcaatgtcgccagcactgggactacccaaccccaacaagccctttactctgtatgttcattctaaccaaggccttgttcttgggctactctgtcaaacattcagcggtaccccacaagccattgtatatctctcaaaacaactgaactcagtcatctaaggttggccaccctgtttaaggatcttatgtgtgtctatgctgctggcctcagaagctcaaaaactcaccctctatcaatacattaccattgcaccttctcataacctacaggaactcatgagtcattgctcccttctttccctcctgctatcttacttacaacaaacacacacctcctacataaacaaccttctaatcacctaccaaagatgtaaagttctcaacccagccaccctcttccctataaggacctttgactctgaactctgtcactcctgcttggactttttagattccctttccttccctttccgacacatatcagagacccccttacaggggacacctacatggttcattgatgggagctcctttaaagagccatgtcttgcagcaggctacaccatcgttgccaaacacaagctcctagagtccaatactgtcgcatcccctaccacctcctaacaggcagaattagtcgacctaactagggccctcaccctagcaataggaaaaagggtcaatatttacactaactgtaagtatgcataccacattctacactcccaagccttaatctcacaggaaagagcttttcttagtaccaaagggacctgcatagtaaatggcaaactgatacacaggttgctggaggtagctaaactaccattagaggccaccattatccattgcaatggacaccagagagctacagatgccataaccaagggaaacattatggcagactcagcagcctggcaggtggcccacaacatcccatcactgttgtccattttcccagcagacatccctcatacacccaggaggaacaagtcaaactaacactggggctacccaaagggaaggctgatgttatcttgacacaaactcatcctgcccaaatctcaagaactctctattccctcccacatccacaaccacttccatgctggttattaccacataccccagtttttaaaaacttacacacactccaccaccatgacaaccaaccttgaatgtttaaccagtctgcccagtttgtggtcagacttcccctgaaggggctcttaaaccacctcctttctccactcatcaggcatgaggccatttcccagaacaggactggcaagttgacttcacccatataccccctgtaaaaaaaggaaagggccaactacagcctgggaaaaatatttgtgaaacctctatctaataaatgatgagtattcagaatacgtaaaacatccctacaaatagcataaacaacacaatttaaaaataggcaaaagttcaagaccagcctgggcaacatggcaaaacactgtttctacaaaaattagctaataagctgggcatggtggtgtgtgcctgtggccccagctacttgggaggctgagatggaaggatcactgattccagggaggtcgaagcttcagtgagctatgatcaaatcactgcactccagcctgggcaacagggtgagatatcatagctgtaattccaacgctttggggggctgaggaaggcggatcacttgaggacaggagttcaacatcagcctggccaacatggtgaaacctcgtctctagtaaaaatacaaaaattatccgggagtgtccaggagtggtggcaggcacctgtaatcccagctactcaagaggctgaggcaggagaattgcttgaacccgggaggcagaggttgcagtcagctgagatcgcgccactgtactccagcctgggcaacaagagtgaaactccgtctgccctccgtctgtctgcaacagagctagactccatgtcaaaaaaaaaaaaaaggcaaaatatttgaacacatttttcactaaagatgatatatgaatggtatataaatgcatgaaaataagttcagaattattactatttaaggaactacaaatgaaaaccacaatgagataccactacatactcattttgatgagtaacattaaccgaatgatcacacctagctgttgaaggtatgaaataaactggagctctcatacattgctggtggaaatgcaaaataaataaatttggaaaacactgtagccgttattaaagttagttgtccacttatcatttgataaattaatctcattcctaagtataacctcaagagatggaaacgtgtccatagaaatacttgtataatcattcctcagtatccatgggggactgattccaggacccccaaggataccaaaacctgaagatgttctagtctcttatataatatgatgtggtatttgcatataacctgtgtatatcctcccacataatttaaattataatttaaattacttataatacctaatacaatgcaaatgctgtttaaatagttgctatacattgtcacctaatacagtgtaaatgctgtttaaatagctgctacacaatagttgtattgtttagggagtaatgacccaaaaaaggtctgtgcatgttcagtacagatgcaatttttcttccaaatattcaatttgcagtgggttgaatctatagatgcagaacccatggatatagaaagccaactgattttgcgtgttatcaacaattttcttcaaagctaaagactggaaaacaaaaacaaatgtctatgcacatctgaatgggtaactgtgttacatttataaatagaatattcctcataaatgtcaaggagggaaaaaaacattaatctgaatctcaaaagcacaagtgaaggaaccaaactcagaggtctatacagagtaaaatttctttcagataaaaatctagaaatggtaaaactcaagtggcaaaatgcaaatgagtgatcctcagatctgggcctaggaggaaggggcggactgcaaagggcagaagagtacatagggtgaggagaaccttctctatcaggattgtggtagtggttacatgctgtttatatttgtcagcactcatcaaattatacactggaaattggggatcatcctatttgtattatactgcactaaatttgtttaaggaaaataataatacacaccaaaaatattcacggctcaagaagtaatatacttcctgccgggtgcagtggctcaggcctgtaatcccagcactttgggaggccgaggcaggtagatcacctgagatcaggagttcaagactagcttggccaacatggcgaaaccccgtccctactaaaaaggcaaaaattagctaggcatggtggcacgtgcctgtaatcccagctacttgggaggctgaggcaggagaatcacttgaacccagaagacagaagttgcagtgtaccaatatcatgccattgcactccagcctgggcagcagagtgagactgtgtctcaaaaaaaaaaaaaaaaaaaagaagtaatatattcccaaattgctctcaaaaatactcttccttaatcttataaagaacatctgcaaaatcctagagtaaatacaataactcatggtccattattaaaatattttcgggaccagaaaccaaaggaggatggtcactgtctgcacatatagtcaattatattgaaagtcctgtctcatgcaattaggtgagacaagaaatatataatctgtaaagaagaaagaaagctaagttcctcgcccccttaaaatatatcttaaatgtcattttcactgtaagtcctactatgaacacctgatttactgtttcaccccatccttaccaactttacttctcagctgtatcctgctctataggacccatcattttctaatacactatcagccgaataacatgggtgctttgcttactgcttactgtctgtttctatcaactaagtctaagttccatgtaggcaattttctttttaattttgtgtgttgatataccccatataatgaaaaaatgacctgacccacaaaaaatatgcaataattttttttgaggggcagagccttgctatgttgtccaggctggagttcagtggcatgatcacagctaacagcagcctcgaactctcaaaactcttgggttcaaaggatcctcctgcttctgcctcccaaagtgctggtattgcaagtgggagccgctgcacctggtctcaataaatagtttttgaaacactgaagaaatatgacataccaatttcctattcatttttacctctccagaaattctgtctaattcattcactgtctctaccttcaagttacctttgttctatgggatgactaaaaaactcacacacagctctatattctgctaccaaaaccttcaaagcggccaggaatccagcagagccatattctcaccttcattctctttctccttagatcttgctgtcctctgcttacctaccctacagatcaattttatttttactttttcattttttcctacatagggtgctcctcagctacttctgtcattcctattagatatctttatgattcaccattaatagtttcagtaatatacacaatactcaaatgttcttcgcaaataacctccattctccttacagatggtcgctgcaattacaggtgaagtgataaccacttcccagcaaaaaggtgagatcagggagttccaaatctttatctcaggttcagatgtcctttccacacctgtacagatgccgtcactccatcattctgacaccagatgccaagtgagtaactcatgcttttcaagtaagtttcaggtccttagatggaaactatctcagaaaattcagtattaattgttctctgtaaaacatttctgggtttggaacacgaaagagtttatatagcaggaaggtcatttgctgagaaaactagacacacatagcatcctgtctatatgccacagataaagacttgatgctacagacatgttaagaacagttagatgacaatggtaagctcttggtactgtgcagatacctggtgtctgtgagagaggtgctgatatgtgcatttcttctgtgaaacagcaggttgtgcaaactggaatctgtaatgtctccacattctgtcatcagcagaagactctgaacatttttctaccgtttaaatgagtctcaattatccaatttataataatgcaaattttacttacagataaatatgggggagtagaggagggttgtgagtttcagccatgaaaaattcatggagcttaaaaattcctaagtatctcaccctgcaaacagataattatatttctaaaagtgtcttgacattctcattctcatgtactcacagtactcttctctatcctcaaagtttctgaattgcttctctgttcctgtctcctctgttattctgcctccctcctcccttccttgcctagtttaagtggatttttagcaaacaaaagtgttgactagaggctgtgagtgaagggcatttttacctcccctggcccccagtgtagattcctcttctgtctacacagaatccttcagatcaggataaaattgagccttccttactagttactacgatttttgaagaattggtgtgattgataaccacagcaacagtgtttggactttagagaaactttattcatgcccacactatgtctactgacctacattttgttacttaaattcattttaagatttctcttccaaaagttttccagttattctcctcttttgattcattgatcccctatatttttattttaccagtaatttcataacttctcttaatattaaaatattttaatgaatatttggaataaacgtatgtgtctatggtgaatactcactgggacacactatacccctccttcttccacaacctcaacctaaggaaggaacactgtctacaagtggtgaggatccttccagatagatttccattaatttacataaattttgcaagatctcccttaactcacctctgcttgacttactgctgagtaaattctttctccatattcccttcatgtaacgtgctaatcagtgaccataaatcacacatgattgttactggtagaatcaatgctttcaactccaacacgtctgtctccacaggttgatgtatatatttatcaacagggagttttctcctcccaaaagtaatgccatttgctctatttattcaatggcataagtggtttactgtaataaaaactactaaactataatcacaaaaaggaaaactttttatttttataaagcctaaataaaatgtgccagaaacaaaaattagagattctttaaaaatgctattgaggtaaaagtgagtgataaaagtagacctgtataaatacaagtctgtgaatattctgtactcagaattttgacatctttaagtgttttagcttactttaaagaactaccatgctgggcgcggtggctcacgcctgtaaccccagcactttgggaggctgaggtgggcagaaaatctgaggtcaggagttcaagaccagcctggccaacatgataaaacccgtctctactaaaaataaaaaaattagctggatgtggtggtgcacgcctgtagtcccagctactcaggaggctgaggcaggggaatcacttgaacctggaaggcagaggctgcagtgagctgagattgcaccactacactccagcctggccaacagagcgagactctgtctcaaaaaaaaaaaaaggaaaagaaaaaaagaactgccaattgtaaatttgtaaatcatgtttaattatagtttatgatagaaaataaaagaaacataaaatttcttacagaagaatttaacccataacaaagtttgagcaaagtaatacaagctacaattaaaataagtcatttcaatttcatttgaatgtgagccaaacattttatgtttttatttttttctcaggattatatctttttatatgttgtatttttttcttttatctggctattaacaatagtaaagtgattgataactttctcttttacattctatgtatttaaatatcttatttagattattttaatttgcaattatttttcattaatatttcattttattaaaaattgccttttttcagtgtttacatattaatggcttacttatccaagattgtaaaaatatacaaatatttttaccgctgagagatttggttttttgtttgtctgtttttgttttttgagagggagtctcactctattgcccagactggagtgcagtggcacaatgtcagctcactgcagcctcctcctcctggttcaagtgattctcctgcctcagcctcccatgaaactgggactacaggcttgagccaccacgcccagctaattttcgtatttttaatagagatgggtttcaccatgttggccaggctggtcttgaactactgacctcaagtgatccacctgccttggcctcccaaagtgttgagattacaggcgtgagtcactacacccagcctaagactattctttactttgggttttttgttgttgttgttgtttaacaggctgtcatttgtcacccaggctggagtagagtggcacgatctcagctcactgcagcctcaacctcctgggttcaagagatcctcctgcctcagccccttttctgcccctcaccccccacccccaatagctggaactacggacgtaccaccacttccagctaatttttgtactttttgtagagactggatttcatcatgtttcccaggctgtctccaactcctgaaatcaagtgatccgcccgcctcggcctcccacagtgctgggattacaggtgtgagccaccgcacccgggattgttattcttcactttgaatcccacatgttatttaaagctaagacctgaggcaaaaaaaaatcacttctatatttcaactaatactattttattactaggtaataagtcccaatatttacatttatgtacacatacacacacatttcctttctataccattaagataatggtagacctttatgtcaggaaaatgctataggctgggggcgagtggctcacgcctgtaatcccagcactttgggaggccgaggcgggaggatcacttgagcctaggagttcgaggccagtctgcacaacgtggtaaaaccatgtctctaaaaaaaaaaaaaaaaaaaaaaaaaaattagctgggcgtggtatcatgagcctgtaatcccagctactttcagctactcgggaggctgaggtgggaggatttcttgagcctgggaggcaaaggttgcagtgagcccagatcccaccactgtactgcagcctgggtgacaagagtgacaacctgtctcaaaaaaaaaaaaaaaaaaaagctattggtaattgaatttatctttattgaacaaatcctcttcattgcatgctttaaattttgatttgtttaaattttattgaattgtaataaaacgattttgaaattactagagaagcccaggcgctgtggctcacgcctgtaatcccaccactgtgggaggccaaggcaggcggatcacctgatgtcaagagttcgagaccagcctgaccaacatggtgaaaccccgtctctactaaaaacaccaaaaaacaattagccgggctagctgaaggcacctgtagtcccagctactcaggaggctgaggcaggagaatggcttgaacccgggaggcggaggttgcagtaagcagagatcgtgccattgcagtacagcctgggcgacagagagagtctccgtcaaaaaagaaaaagaagagaaaagaaaaagagaaaggaaggaagggaggaagggaggaagggaggacgagaggaagggaggaagggagggagggaaaagaaattcctgggcagatgaaagtgaggggtcgggggtcggggtcgggcgcggcgatgccgcagctgcggggctcggtggactcggcgagcaagagccccaggacgctgctggcggcgggcgaggagctggggcgcggcgcggggcggctctaggcgctgtggccgctcagcgtctgggacccagcgccgcccaggtcagggaatccttggtgttcccgccccgcagcacccggggcgggggaggagtcggcgcggtcgtgcggccgtggaggacagcgagacccggggctgcggctgcaggccgaggggcccctgggacagtgagaagcagcggcgggagctagtcacggggcagggagcgctcagcggtaaagacggcttcatctgactccagggctggcaggcggcccggatggcatgccgtctcctgcggagaattccaatttccccctaaatcgctcaacaagcgagaaggttttgggattcgaattcagtggggcaagcgaagtcgcctttccttcttaaacagatggaatccctggtccacaaacgtaccctgtgccaatttcatacaacacgctatggctgctgcggatgagaacacagcaactctgccagatgaaaagcttcaaggctctgtgaatccaaggtcaaaaacgccaaaaaggaaagtccttttccaggacaagcgcacgcgtgctggtcgtggagcgccccctcctcatggagaccggcctgggattgatgtccttcattaacaatgaggctaaactgggctattccatgactgaccaggggcaaaataggcttttagccagcggcattctgggagctctccccactaagaaggccaagggatgtggggtctgagagcctggcagtcctcatgcaaagccgctgctggctggaagcataggggtcttttaccttttgggatc

SEQ ID NO: 818 - DNA, 2654 bp, Homo sapiens
agcagcgccgcagccggacgagaaagcggaagatggcggcggcggccgggaggccgtgaggagagcggcggctgcgagggcggccgatggcggccgggaggcgccctcggacacttgcgggtcgttagggcgcgacgctgggaggcatgtcggagcacgtggagcccgcagctccggggcccgggcccaacggcggcggcggcggcccggcccccgcgcgcgggcctcgcacccccaatctcaaccccaaccccctcatcaacgtgcgcgaccggctcttccacgcgctgttcttcaagatggctgtcacctattcgcggctcttcccgcccgccttccgccgtctcttcgagttcttcgtgctgctcaaggccctgtttgtgctcttcgtcctggcctacatccacatcgtcttctcccgctcgcccatcaactgcctggagcatgtgcgtgacaagtggccgcgtgagggcatcctgcgtgtggaagtgcggcacaactcgagccgcgcgcccgtcttcctacagttctgtgacagcggcggccgcgggagcttcccgggcctggccgtggaaccaggcagcaacctggacatggaagatgaggaggaggaagagctgaccatggagatgtttgggaacagctccatcaagtttgagctggacatcgagcccaaggtgttcaagccgccgagtagcacagaggccctgaatgacagccaggagttccccttccccgagacgcccaccaaagtgtggccgcaggacgagtacatcgtggagtactcactagagtatggcttccttcgcctgtcgcaggccacccgccagcgcctgagcatccccgtcatggtggtcaccctggaccccacgcgggaccagtgcttcggggaccgcttcagccgcctgctgctggatgagttcctgggctacgatgacatcctcatgtccagcgtgaagggcctggccgagaacgaggagaacaagggcttcctgcggaatgtggtgtcgggcgagcactaccgctttgtgagcatgtggatggcgcggacgtcctacctggccgccttcgccatcatggtcatcttcacgctgagcgtgtccatgctgctgcggtactcacaccaccagatcttcgtcttcatcgtggacctgctgcagatgctggagatgaacatggccatcgccttccccgcagcgcccctgctgaccgtcatcctggccctcgtcgggatggaggccatcatgtcggagttcttcaacgacaccaccaccgccttctacatcatcctcatcgtgtggctcgcggaccagtatgacgccatctgctgccacaccagcaccagcaagcggcattggctgcgcattccatgatctacttcttccaccactacgagctgcctgccatcctgcagcaggtccgcatccaggagatgctgcttcaggcgccgccactgggccccgggacccccacggcgctgcccgatgacatgaacaacaactcgggcgccccggctacagcccctgactctgccggccagccccccgccctgggccccgtctcgcctggggccagcgggagtcccgggcctgtggcagcggcgcccagctccctggtggccgcggcagcctcagtggcagcagctgccggtggtgacctgggttggatggcagagaccgctgccatcatcacagacgcctccttcctgtccggcctgagcgcctccctcctggagcggcgtccagccagcccgctgggccctgctgggggcctcccccacgccccccaggacagtgtccccccgagtgactccgcagcttctgacacaactcccctgggggctgcggtaggcgggcctagcccggcctccatggccccaacggaggcgccctcggaggtggggtcctgagccgcacagctgagccgcctctgacccctgctggctgggcctgaccttcccgagcccgtgggggtgggggaggccagccacctccttcctctgggactgcccagcctgtgtcgggggctttcagggtttcgtggggtttgcccggaaggcggctttcctccccctggtgtgaggtcgcgcccgaggcttgtacccgctagtgaggtgtttgagctggtcagcaaggagagggggtggggttccgcggaaggttctggaggggtcttggtaggtctgcagtgaaccgtcctgaggatggagtggggtcccatggtgcaggtctctgagcaaggcggaggtgtggaggagaggccggcttggggtggggcctcgcgccctagtgccggccggcctcagcccggctctgcctggtgctccctgcagtgccttctccatggccccgccctccccgcgtgtgcgccaggcttggggtccccgggagagcagagcttgcgcctcgggcatagggacgtggggtgcaggcgccaacatcagtggcagcagccagggccgtggtccagtcccactcggggatggagtgggccggcggccaaaccagtcactcggggaggaatgcggaggagcgctcattccattctatttaattgcagtgtacaaaattgtgtttgtatatagaataaactgtctgttgacagcggcaaaaaaaaaaaaaaaaaaaaaaaaaaaaaaaaaaaaaaaaaaaaaa

SEQ ID NO: 819 - DNA, 3120 bp, Homo sapiens
ccaagccggagcccgagctggaggaagcccccaggtgccaggatctgcccggatccgcgcccgctccggccggcaccatggacagcgaggcattccagagcgcgcgggactttctggacatgaacttccagtcgctggccatgaaacacatggatctgaagcagatggagctggacacggcggcggccaaggtggatgaactgaccaagcagctggagtcgctgtggtcagactctcccgcgcctcctggcccgcaggccggacccccttctaggccgccccggtacagctccagctcgatccctgagcccttcggcagccgagggtccccccggaaggcggccaccgacggcgcagacaccccgttcggacgatcagagagtgccccaaccctacacccctacagcccgctgtcccccaagggacggccgtcgtcgccgcgcaccccgctctacctgcagccggacgcctacggcagcctggaccgcgcgacctcgccccggccccgcgccttcgatggcgcaggcagctccctcggccgtgcgccctccccgcggcccgggccaggcccgctccgccagcagggtccccccacgcctttcgacttcctgggccgcgcaggctccccccgcggcagccccctggcggaggggccccaggccttcttccccgagcgtgggccgtcaccgcgcccccctgccacagcctacgacgcgccagcgtccgccttcgggagctccctgctaggctccggcggcagcgcattcgccccgcctctgcgcgcgcaagacgacctgacgctgcgccggcggcctccgaaagcctggaacgagtctgacctggacgtggcgtacgagaagaagccttcgcagacagcgagctatgaacgcctggacgtcttcgcaaggcctgcctcgccgagcctgcagctgttgccttggagggagagcagcctggatggactggggggcaccggcaaggacaacctcactagcgccaccctgccgcgcaattacaaggtctctcctctggccagcgaccggcgttcagacgcgggcagctaccggcgctcgctgggctccgcggggccgtcgggcactttgcctcgcagctggcagcccgtcagccgcatccccatgcccccctccagcccccagccccgcggggccccgcgccagcgtcccatccccctcagcatgatcttcaagctgcagaacgccttctgggagcacggggccagccgcgccatgctccctgggtcccccctcttcacccgagcacccccgcctaagctgcagccccaaccacaaccacagccccagccacaatcacaaccacagccccagctgcccccacagccccagacccaaccccaaacccctaccccagccccccagcatccccaacagacatggccccctgtgaacgaaggaccccccaaaccccccaccgagctggagcctgagccggagatagaggggctgctgacaccagtgctggaggctggcgatgtggatgaaggccctgtagcaaggcctctcagccccacgaggctgcagccagcactgccaccggaggcacagtcggtgcccgagctggaggaggtggcacgggtgttggcggaaattccccggcccctcaaacgcaggggctccatggagcaggcccctgctgtggccctgccccctacccacaagaaacagtaccagcagatcatcagccgcctcttccatcgtcatggggggccagggcccggggggccggagccagagctgtcccccatcactgagggatctgaggccagggcagggccccctgctcctgccccaccagctcccattccacccccggccccgtcccagagcagcccaccagagcagccgcagagcatggagatgcgctctgtgctgcggaaggcgggctccccgcgcaaggcccgccgcgcgcgcctcaaccctctggtgctcctcctggacgcggcgctgaccggggagctggaggtggtgcagcaggcggtgaaggagatgaacgacccgagccagcccaacgaggagggcatcactgccttgcacaacgccatctgcggcgccaactactctatcgtggatttcctcatcaccgcgggtgccaatgtcaactcccccgacagccacggctggacacccttgcactgcgcggcgtcgtgcaacgacacagtcatctgcatggcgctggtgcagcacggcgctgcaatcttcgccaccacgctcagcgacggcgccaccgccttcgagaagtgcgacccttaccgcgagggttatgctgactgcgccacctacctggcagacgtcgagcagagtatggggctgatgaacagcggggcagtgtacgctctctgggactacagcgccgagttcggggacgagctgtccttccgcgagggcgagtcggtcaccgtgctgcggagggacgggccggaggagaccgactggtggtgggccgcgctgcacggccaggagggctacgtgccgcggaactacttcgggctgttccccagggtgaagcctcaaaggagtaaagtctagcaggatagaaggaggtttctgaggctgacagaaacaagcattcctgccttccctccagacctctccctctgttttttgctgcctttatctgcacccctcaccctgctggtggtggtccttgccaccggttctctgttctcctggaagtccagggaagaaggagggccccagccttaaatttagtaatctgccttagccttgggaggtctgggaagggctggaaatcactggggacaggaaaccacttccttttgccaaatcagatcccgtccaaagtgcctcccatgcctaccaccatcatcacatcccccagcaagccagccacctgcccagccgggcctgggatgggccaccacaccactggatattcctgggagtcactgctgacaccatctctcccagcagtcttggggtctgggtgggaaacattggtctctaccaggatccctgccccacctctccccaattaagtgccttcacacagcactggtttaatgtttataaacaaaatagagaaactttccttataaataaaagtagtttgcacagaaattga

SEQ ID NO: 820 - DNA, 2520 bp, Homo sapiens
gccgtgttctccttctgcgtgggcgtggcgggccgcgcgcgggtctccgtggaagtccgtttcgtgagcagcgccaagggaaaggggctgtttgccacacagctcatccggaagggggagaccatcttcgtagaacggcccctggtggctgcacagtttctctggaatgcactttatcgctaccgagcctgtgaccactgccttagggcactagagaaggcagaggagaatgcccagaggctgaccgggaaaccaggccaggttctgcctcacccagagctgtgcactgtgcgcaaagacctccaccagaactgtccccattgccaagtgatgtactgcagtgcagaatgtcggttggcagccactgagcaataccaccaggtcctgtgcccaggcccctcccaggatgaccccttgcatcctctcaataagcttcaggaggcatggaggagtattcactacccacctgagactgcaagcatcatgttgatggctaggatggtggccacagtgaagcaggcgaaggacaaggaccgttggatcagactcttttcccagttttgtaacaaaacagccaatgaagaggaggaaattgtccataaacttctgggagacaaattcaagggccaactggaacttctgcggagactcttcacagaggccctctatgaggaagcagtcagccagtggttcactccagatggattccggtctctctttgctcttgttgggaccaatggccaaggaatcgggaccagctccctaagccagtgggtccatgcctgtgacactctggagttgaagcctcaggaccgtgagcacgttgacgccttcattgaccagctatacaaggacatcgaggcagcaactggagagtttcttaactgtgaaggatctggcctctttgtgcttcagagctgctgcaaccacagttgtgtgcccaatgcagagacctcctttccagaaaacaacttccttttgcatgtcactgctctggaggatattaagccaggagaggaaatttgtatcagctacttggactgctgtcagcgggagcgcagccgccacagccgccacaagatcctcagggagaactatctatttgtctgttcctgtcccaaatgcctggcagaggctgatgaacccaatgtgacctcagaagaggaagaggaagaggaggaggaggaggaaggagagccagaagatgcagagctgggggatgagatgactgatgtgtgatgttgccctgcccagaaagggccctgccctagaccctgccagaaaagggggctcttcccccagagaagtggcttggagggaacttcccactcccattgcctgctttccccattccagccctctctgctagagggtaggagagagcctggatctctggccccaacccccaccagacctcatgccctggacactgctgctgagttggctcagactctgcactggcactgagcctttcacaactggcctccccttgaggttcctccactctagggtttgaggggctggaatcagggccagggcctaacagtgtttcttcccctcggccccacggcccatactcaccccttcacctgaggcttctcccctctcaacttgctgttgatttcttttgaggggtaaaagaaagaccgagttcattgaagcagagatgggaggtggtgaggcgtcctcacctccccccaccacagctgtggctggtaaggcaactgcttgaccactggcccagcaagcagaggcgggcaggaggatctgggcatcctgagccccttccctgaggctgtctcctgggaatgctggaccagggggattacttcccccacccacacccccatttggacatctggggaagtggagattaaccctcccccagactcgtgccttgcctctcaggacctggcacagtggctggccttatggagtatggaaaaggcctctgccttcctcaggagggacacatagtgggtcatcaccctttctcacacctgcttcccaatgagcactcagcagcatggctgagacctggggcttgacaggcctgcgctccttagattaggatgctctggtattcctggggccagttaaaatgggtcagtgaggggctctcctggcctcaatctccatctttagggtctccacagactaacattgaagtcttccagaaacctcgaggagctgggctagatacttcgagagtagccctgtcttgtcccctcctacccccagattagcaccacccctctcactcttgggttggatgctatgggaattacaacccatcactcccaatgcctccctttcctggaggagcctgctgcattctcctgctgagggatcccagagagggcaggtgcccaccccacaggccctttcctggaccatggagccaggtgaaacctgtctggccccttacccattgggttcttactccttcacaacggtcagcactcctctcccagcccccctgcccactgttctcaataaaatgtgagtggtgaaaaaaaa

SEQ ID NO: 821 - DNA, 3260 bp, Homo sapiens
cagaagcaggggggaatcctgaatcgagctgagagggcttccccggttctcctgggaaccccatcggccccctgccagcacacacctgagcagcatcacaggacatggccccctcagccacctagctggggcccatctaggagtggcatcttttttggtgccctgaaggccagctctggaccttcccaggaaaagtgccagctcacagaactgcttgaccaaaggaccggctcttgagacatcccccaacccacctggcccccagctagggtgggggctccaggagactgagattagcctgccctctttggacagcagctccaggacagggcgggtgggctgaccacccaaaccccatctgggcccaggccccatgccccgaggaggggtggtctgaagcccaccagagccccctgccagactgtctgcctcccttctgactgtggccgcttggcatggccagcaacagcagctcctgcccgacacctgggggcgggcacctcaatgggtacccggtgcctccctacgccttcttcttcccccctatgctgggtggactctccccgccaggcgctctgaccactctccagcaccagcttccagttagtggatatagcacaccatccccagccaccattgagacccagagcagcagttctgaagagatagtgcccagccctccctcgccaccccctctaccccgcatctacaagccttgctttgtctgtcaggacaagtcctcaggctaccactatggggtcagcgcctgtgagggctgcaagggcttcttccgccgcagcatccagaagaacatggtgtacacgtgtcaccgggacaagaactgcatcatcaacaaggtgacccggaaccgctgccagtactgccgactgcagaagtgctttgaagtgggcatgtccaaggagtctgtgagaaacgaccgaaacaagaagaagaaggaggtgcccaagcccgagtgctctgagagctacacgctgacgccggaggtgggggagctcattgagaaggtgcgcaaagcgcaccaggaaaccttccctgccctctgccagctgggcaaatacactacgaacaacagctcagaacaacgtgtctctctggacattgacctctgggacaagttcagtgaactctccaccaagtgcatcattaagactgtggagttcgccaagcagctgcccggcttcaccaccctcaccatcgccgaccagatcaccctcctcaaggctgcctgcctggacatcctgatcctgcggatctgcacgcggtacacgcccgagcaggacaccatgaccttctcggacgggctgaccctgaaccggacccagatgcacaacgctggcttcggccccctcaccgacctggtctttgccttcgccaaccagctgctgcccctggagatggatgatgcggagacggggctgctcagcgccatctgcctcatctgcggagaccgccaggacctggagcagccggaccgggtggacatgctgcaggagccgctgctggaggcgctaaaggtctacgtgcggaagcggaggcccagccgcccccacatgttccccaagatgctaatgaagattactgacctgcgaagcatcagcgccaagggggctgagcgggtgatcacgctgaagatggagatcccgggctccatgccgcctctcatccaggaaatgttggagaactcagagggcctggacactctgagcggacagccggggggtggggggcgggacgggggtggcctggcccccccgccaggcagctgtagccccagcctcagccccagctccaacagaagcagcccggccacccactccccgtgaccgcccacgccacatggacacagccctcgccctccgccccggcttttctctgcctttctaccgaccatgtgaccccgcaccagccctgcccccacctgccctcccgggcagtactggggaccttccctgggggacggggagggaggaggcagcgactccttggacagaggcctgggccctcagtggactgcctgctcccacagcctgggctgacgtcagaggccgaggccaggaactgagtgaggcccctggtcctgggtctcaggatgggtcctgggggcctcgtgttcatcaagacacccctctgcccagctcaccacatcttcatcaccagcaaacgccaggacttggctcccccatcctcagaactcacaagccattgctccccagctggggaacctcaacctcccccctgcctcggttggtgacagagggggtgggacaggggcggggggttccccctgtacataccctgccataccaaccccaggtattaattctcgctggttttgtttttattttaatttttttgttttgatttttttaataagaattttcattttaagcacatttatactgaaggaatttgtgctgtgtattggggggagctggatccagagctggagggggtgggtccgggggagggagtggctcggaaggggcccccactctcctttcatgtccctgtgccccccagttctcctcctcagccttttcctcctcagttttctctttaaaactgtgaagtactaactttccaaggcctgccttcccctccctcccactggagaagccgccagcccctttctccctctgcctgaccactgggtgtggacggtgtggggcagccctgaaaggacaggctcctggccttggcacttgcctgcacccaccatgaggcatggagcagggcagagcaagggccccgggacagagttttcccagacctggctcctcggcagagctgcctcccgtcagggcccacatcatctaggctccccagcccccactgtgaaggggctggccaggggcccgagctgcccccacccccggcctcagccaccagcacccccatagggcccccagacaccacacacatgcgcgtgcgcacacacacaaacacacacacactggacagtagatgggccgacacacacttggcccgagttcctccatttccctggcctgccccccacccccaacctgtcccacccccgtgccccctccttaccccgcaggacgggcctacaggggggtctcccctcacccctgcacccccagctgggggagctggctctgccccgacctccttcaccaggggttggggccccttcccctggagcccgtgggtgcacctgttactgttgggctttccactgagatctactggataaagaataaagttctatttattct

SEQ ID NO: 822 - DNA, 3142 bp, Homo sapiens
tgcgagctgtttgaggactgggatgccgagaacgcgagcgatccgagcagggtttgtctgggcaccgtcggggtaggatccggaacgcattcggaaggctttttgcaagcatttacttggaaggagaacttgggatctttctgggaaccccccgccccggctggattggccgagcaagcctggaaaatggtaaatgatcatttggatcaattacaggcttttagctggcttgtctgtcataattcatgattcggggctgggaaaaagaccaacagcctacgtgccaaaaaaggggcagagtttgatggagttgggtggacttttctatgccatttgcctccacacctagaggataagcacttttgcagacattcagtgcaagggagatcatgtttgactgtatggatgttctgtcagtgagtcctgggcaaatcctggatttctacactgcgagtccgtcttcctgcatgctccaggagaaagctctcaaagcatgcttcagtggattgacccaaaccgaatggcagcatcggcacactgctcaatcaattgaaacacagagcaccagctctgaggaactcgtcccaagccccccatctccacttcctccccctcgagtgtacaaaccctgcttcgtctgccaggacaaatcatcagggtaccactatggggtcagcgcctgtgagggatgtaagggctttttccgcagaagtattcagaagaatatgatttacacttgtcaccgagataagaactgtgttattaataaagtcaccaggaatcgatgccaatactgtcgactccagaagtgctttgaagtgggaatgtccaaagaatctgtcaggaatgacaggaacaagaaaaagaaggagacttcgaagcaagaatgcacagagagctatgaaatgacagctgagttggacgatctcacagagaagatccgaaaagctcaccaggaaactttcccttcactctgccagctgggtaaatacaccacgaattccagtgctgaccatcgagtccgactggacctgggcctctgggacaaattcagtgaactggccaccaagtgcattattaagatcgtggagtttgctaaacgtctgcctggtttcactggcttgaccatcgcagaccaaattaccctgctgaaggccgcctgcctggacatcctgattcttagaatttgcaccaggtataccccagaacaagacaccatgactttctcagacggccttaccctaaatcgaactcagatgcacaatgctggatttggtcctctgactgaccttgtgttcacctttgccaaccagctcctgcctttggaaatggatgacacagaaacaggccttctcagtgccatctgcttaatctgtggagaccgccaggaccttgaggaaccgacaaaagtagataagctacaagaaccattgctggaagcactaaaaatttatatcagaaaaagacgacccagcaagcctcacatgtttccaaagatcttaatgaaaatcacagatctccgtagcatcagtgctaaaggtgcagagcgtgtaattaccttgaaaatggaaattcctggatcaatgccacctctcattcaagaaatgctggagaattctgaaggacatgaacccttgaccccaagttcaagtgggaacacagcagagcacagtcctagcatctcacccagctcagtggaaaacagtggggtcagtcagtcaccactcgtgcaataagacattttctagctacttcaaacattccccagtaccttcagttccaggatttaaaatgcaagaaaaaacatttttactgctgcttagtttttggactgaaaagatattaaaactcaagaaggaccaagaagttttcatatgtatcaatatatatactcctcactgtgtaacttacctagaaatacaaacttttccaattttaaaaaatcagccatttcatgcaaccagaaactagttaaaagcttctattttcctctttgaacactcaagattgcatggcaaagacccagtcaaaatgatttacccctggttaagtttctgaagactttgtacatacagaagtatggctctgttctttctatactgtatgtttggtgctttccttttgtcttgcatactcaaaataaccatgacaccaaggttatgaaatagactactgtacacgtctacctaggttcaaaaagataactgtcttgctttcatggaatagtcaagacatcaaggtaaggaaacaggactattgacaggactattgtacagtatgacaagataaggctgaagatattctactttagttagtatggaagcttgtctttgctctttctgatgctctcaaactgcatcttttatttcatgttgcccagtaaaagtatacaaattccctgcactagcagaagagaattctgtatcagtgtaactgccagttcagttaatcaaatgtcatttgttcaattgttaatgtcactttaaattaaaagtggtttattacttgtttaatgacataactacacagttagttaaaaaaaatttttttacagtaatgatagcctccaaggcagaaacacttttcagtgttaagtttttgtttacttgttcacaagccattagggaaatttcatgggataattagcaggctggtctaccacctggaccatgtaactctagtgtccttcctgattcatgcctgatattgggatttttttttccagccttcttgatgccaaggggctaattaatattaacaactcccaaagaaacaggcatagaatctgcctcctttgaccttgttcaatcactatgaagcagagtgaaagctgtggtagagtggttaacagatacaagtgtcagtttcttagttctcatttaagcactagtggaattttttttttttgatatattagcaagtctgtgatgtactttcactggctctgtttgtacattgagattgtttgtttaacaatgctttctatgttcatatactgtttacctttttccatggagtctcctggcaaagaataaaatatatttattttaaaaaaaaaaaaaaaaaaaaaaaaaaaaaaaaaaaaaaaaaaaaaaaaaaaaaaaaaaaaaaaaaaaaaaaaaaaaaaaaaaaaaaaaaaaaa

SEQ ID NO: 823 - DNA, 2992 bp, Homo sapiens
tggggggggggtggggagggagaaaaagaaagaaaatattttccgtgtccccgcctgcagagtcagtgtgcggtttgggagaaaatgtgtcggatattttggggcggtcacgtgggcgggcgggctccgagaggccccgggacagtcccagcctagagccgtgcccccccaggagccccccagtacggcgagccccggacattgcgacgctccatccaagagactgcccgacgccgggacctcggggctccgccgcctcccttccccctcccactccagctacggcccagttccctcaacctgacccagtatgtagaagccagtctctgcaggcggccagcgggacttttggaggcccagtgggcaggccaggcagggcgggtacggagcctcccaggctggggcagtgggcatgggcaggggctgtggctgaagacctcgcccgcccactgcagaccccaggggactctcacaccgcagctgccatggccaccaataaggagcgactctttgcggctggtgccctggggcctggatctggctacccaggggcaggtttccccttcgccttcccaggggcactcagggggtctccgcctttcgagatgctgagccctagcttccggggcctgggccagcctgacctccccaaggagatggcctctctgtcggtggagacacagagcaccagctcagaggagatggtgcccagctcgccctcgccccctccgcctcctcgggtctacaagccatgcttcgtgtgcaatgacaagtcctctggctaccactatggggtcagctcttgtgaaggctgcaagggcttctttcgccgaagcatccagaagaacatggtgtacacgtgtcaccgcgacaaaaactgtatcatcaacaaggtgaccaggaatcgctgccagtactgccggctacagaagtgcttcgaagtgggcatgtccaaggaagctgtgcgaaatgaccggaacaagaagaagaaagaggtgaaggaagaagggtcacctgacagctatgagctgagccctcagttagaagagctcatcaccaaggtcagcaaagcccatcaggagactttcccctcgctctgccagctgggcaagtataccacgaactccagtgcagaccaccgcgtgcagctggatctggggctgtgggacaagttcagtgagctggctaccaagtgcatcatcaagatcgtggagtttgccaagcggttgcctggctttacagggctcagcattgctgaccagatcactctgctcaaagctgcctgcctagatatcctgatgctgcgtatctgcacaaggtacaccccagagcaggacaccatgaccttctccgacgggctgaccctgaaccggacccagatgcacaatgccggcttcgggcccctcacagaccttgtctttgcctttgctgggcagctcctgcccctggagatggatgacaccgagacagggctgctcagcgccatctgcctcatctgcggagaccgcatggacctggaggagcccgaaaaagtggacaagctgcaggagccactgctggaagccctgaggctgtacgcccggcgccggcggcccagccagccctacatgttcccaaggatgctaatgaaaatcaccgacctccggggcatcagcactaagggagctgaaagggccattactctgaagatggagattccaggcccgatgcctcccttaatccgagagatgctggagaaccctgaaatgtttgaggatgactcctcgcagcctggtccccaccccaatgcctctagcgaggatgaggttcctgggggccagggcaaagggggcctgaagtccccagcctgaccagggcccctgacctccccgctgtgggggttggggcttcaggcagcagactgaccatctcccagaccgccagtgactgggggaggacctgctctgccctctccccaccccttccaatgagctccttgtttttgccaaagtttctaggggtgcctctgtgttcatccccttcctgatctaaccggctccctcgccagtcccgggggcctgccctgctcccaccaggagagagggcaaagggatgagcctgggtttggactctaaaatctcagcactgccccatgggtcctagacttcccagggcaagaggaagaccctgccattccacagccccttcctctgccaggtgcttggctctctgagagcaaacaggaacactagagaccaaaaaggggacaaaggagaagggctgagcccaccttcttgctcctacccttggtgcctaatgctgtgtgatgcacctgcagggtgtgtgctagcctctgtgccccgtccttgtgccaggtcaaggtgggggcaggctgggccctgcatttctggggcaggaacagagggtgaaagggacagatagatgcaggtccattctgcacctcttggctcgggtgcagagttcaccctgtgccctccgttataagtccctcccccagccctgtcatgtgccttgggctcctcctgccctccatctcagccattggggcagggaccctcctacactacagaggggccaggggatccctctctccctagtgccttccaccctttactccccagagcagcttggcccagggaggggggatgctgcttagctgatcccgccctgacccagaggaagcctctatttatttattagcttttgtttacaccgtggaattgaccccttcctccaggggtcttgggtgggggagcccagggcccctgtgacccctcctttcttcctccaatccccagtttgtatttagctgccaaataagattcccattggctccctgtgttctcttggggggtcagggtgctgtcccctcccctctgtttacatctcccctctaccccgctgtatcgcatattgctgagttttctatttttgcaaaataaagtgatggaaactcaaaaaaaaaaaaaaaaaaaaaaaaaaaaaaaaaaaa

SEQ ID NO: 824 - DNA, 3197 bp, Homo sapiens
ctgggactaaggcggcagcgggctgagcgctcggccacccccagcgtgcgcagcccgggcgggcttcgcccgcggagcttgacctagggtcgggacccgtcgggttgcaccgccgcactcgggaagacccggcttcgagcctctcctctccgtctccaaagcgccctcccgcctcccggcgctccccatgcacctgccgggctgcgcgccagccatggccgacgggagcttctcgcttgccggccacctgctccgcagcccgggcgggagcacctcgcgacttcacagcatcgaggccatcctggggtttaccaaggacgacgggatcctcggcaccttcccggcggagcggggcgcccggggcgcgaaggagcgggataggaggctgggcgcgcggcccgcctgccccaaggcgcccgaggaaggctccgagccctccccgccgccagccccggcgcccgcccccgagtacgaagcccctcgaccctactgccccaaggagcccggggaggcacggccgagcccagggctgcccgtcgggccagccaccggcgaagcgaaactgtcagaggaggaacagcccaagaaaaagcatcggcggaaccgcacgactttcaccacgtaccagctgcatgagctggagcgcgcgttcgagaagtcccactacccggacgtgtacagccgcgaggagctggccggcaaggtcaacctaccagaggtccgggtccaggtgtggttccagaaccgacgggctaagtggcggcggcaggagaagctggaagtgtcctccatgaagctgcaggactcgcccctcctctccttcagccgctccccgccctccgcgacgctgtcgcccctcggggcgggcccgggcagcggtggcgggccggctgggggcgcgctgccgctggagtcctggctcgggccgccgctgccgggcgggggcgccacggcgctgcagagcctgccgggcttcgggccgccggcgcagagcctgcctgccagctacacgccaccgccgccgcctccgcccttcctgaactccccgccgttgggccccggcctgcaacctctcgcgccgccgccgccctcctacccgtgcgggcccggcttcggggacaagttcccgctggacgaggcggacccgcgcaacagcagcatcgcggcgctgcgtctgaaagccaaggagcacatccaggccatcgggaagccgtggcaggccctctaggggcactggggaacgtcttgggatccgaccccgggccgaccgcaccgtacccgcatcctctctcccagggacaacccccctccccagctcggcccctctttccctgtcgcctgcagccacccgccaagcatagttcagggccacgcgcctgctcccgatgcacggggagaagggcgactttcaggcctgaggagaggccctctggccgcctcaacgcacttcgcggacctcagccctgcagctggagggcaacaggctgccgggccccgctggccacgccgctcccatcaccgcaggcgctggagcctccaggcccaaacaggctgaagctcctaaacttggccattcccaggaggcttggagacccccagataaccataacagggaagcaggggaggcggaaaaatagagtttgagaaacttttgtataagtagtttcaaactatttgagaggagaattaaagacatgcttgttttgtttcgactctgtttaagcacgctcaggacttggggagaggagtgaatattggggtacgggaggagggtgcgttgacggacagggtgggtcagggaaagaggaggactgagaagaagctcagggtttccttgtgaaaattctagggacacttcgctgcagcagagaatcgtccccattccgaacgcttcggcggcctagaccagaggcgcccttccctggagccggcgtgcgcgcttggggtccggagtggatggggctaaggctcagatgctagcgcgctcccagttcccccgctagccccatagtccagcggcagctgatattttcaagtttgacttcaatagaaagcgtcaagaccaccttccctagggcgagagcgaagtgtcccccggcccctggcgtccccgctctcctaaggactcctctcagttcaccaagcagatctccggttcggtgccagtccctaacacccaaggttgatcaccagcggtacaagaactgaggcaaagagatgcttttccttttcggagccgcgagactctctaacctccccaactcgctccacactcgccaacccagagttcggtaaaaggcgcgtctggtgaggtgccgcgctcggagagtgtcctggagcgccctacgccaccgccccgagagctagttcttgcgggcgtgccctggacagtatctgcagttctttggcgccggctctagggcgaggaaggaatctcgaaatctcagcccgcttcacaatctcctgagactctctgaagaaggagagtcccggactcccgcctgagcgtgctcgatatccaccgttgacactggaagctgggcgaccgccagcagaacctggatgcccgccaacaggtcctggcacggggggggggggggcgtccaccccacaacccccgtccctaagcgtgctttcaggatgatgcccccagagccttaattagcatcaactggctactgtctgtcggtcctgagcaaattagtgaagctcccagtcccctttcctcgtctaaataaactctgtctctctggaaggtgggaaagatggaataagatcacctgtaaaggctttgtggaaagtaccaagaccctggcatgacgcaatatggattgtaatcatcgtccccatttccccgaaattccctggctgttctccggttcctgaaaccgacttgggaaaaggatgaccacgctggagctgggaatatgggaagcctcatcatagtttccagtcctttctctgcgggtctaagaggctattgcataaccagggctgtgtacccctagacctccagatggtgccttgcacacagtaggctgatcagtaaaaatgtactgaataaattattcccccccaagaggtagggagtaatatctgcacttttcctcacaaggatgtctccttgggggaggaggatggagcagcccgtgtgttatcaccttttagcaagaaaacaaaacaaaacaaaaccagaa

SEQ ID NO: 825 - DNA, 4772 bp, Homo sapiens
gctcagttgccgggcgggggagggcgcgtccggtttttctcaggggacgttgaaattatttttgtaacgggagtcgggagaggacggggcgtgccccgacgtgcgcgcgcgtcgtcctccccggcgctcctccacagctcgctggctcccgccgcggaaaggcgtcatgccgcccaaaaccccccgaaaaacggccgccaccgccgccgctgccgccgcggaacccccggcaccgccgccgccgccccctcctgaggaggacccagagcaggacagcggcccggaggacctgcctctcgtcaggcttgagtttgaagaaacagaagaacctgattttactgcattatgtcagaaattaaagataccagatcatgtcagagagagagcttggttaacttgggagaaagtttcatctgtggatggagtattgggaggttatattcaaaagaaaaaggaactgtggggaatctgtatctttattgcagcagttgacctagatgagatgtcgttcacttttactgagctacagaaaaacatagaaatcagtgtccataaattctttaacttactaaaagaaattgataccagtaccaaagttgataatgctatgtcaagactgttgaagaagtatgatgtattgtttgcactcttcagcaaattggaaaggacatgtgaacttatatatttgacacaacccagcagttcgatatctactgaaataaattctgcattggtgctaaaagtttcttggatcacatttttattagctaaaggggaagtattacaaatggaagatgatctggtgatttcatttcagttaatgctatgtgtccttgactattttattaaactctcacctcccatgttgctcaaagaaccatataaaacagctgttatacccattaatggttcacctcgaacacccaggcgaggtcagaacaggagtgcacggatagcaaaacaactagaaaatgatacaagaattattgaagttctctgtaaagaacatgaatgtaatatagatgaggtgaaaaatgtttatttcaaaaattttataccttttatgaattctcttggacttgtaacatctaatggacttccagaggttgaaaatctttctaaacgatacgaagaaatttatcttaaaaataaagatctagatgcaagattatttttggatcatgataaaactcttcagactgattctatagacagttttgaaacacagagaacaccacgaaaaagtaaccttgatgaagaggtgaatgtaattcctccacacactccagttaggactgttatgaacactatccaacaattaatgatgattttaaattcagcaagtgatcaaccttcagaaaatctgatttcctattttaacaactgcacagtgaatccaaaagaaagtatactgaaaagagtgaaggatataggatacatctttaaagagaaatttgctaaagctgtgggacagggttgtgtcgaaattggatcacagcgatacaaacttggagttcgcttgtattaccgagtaatggaatccatgcttaaatcagaagaagaacgattatccattcaaaattttagcaaacttctgaatgacaacatttttcatatgtctttattggcgtgcgctcttgaggttgtaatggccacatatagcagaagtacatctcagaatcttgattctggaacagatttgtctttcccatggattctgaatgtgcttaatttaaaagcctttgatttttacaaagtgatcgaaagttttatcaaagcagaaggcaacttgacaagagaaatgataaaacatttagaacgatgtgaacatcgaatcatggaatcccttgcatggctctcagattcacctttatttgatcttattaaacaatcaaaggaccgagaaggaccaactgatcaccttgaatctgcttgtcctcttaatcttcctctccagaataatcacactgcagcagatatgtatctttctcctgtaagatctccaaagaaaaaaggttcaactacgcgtgtaaattctactgcaaatgcagagacacaagcaacctcagccttccagacccagaagccattgaaatctacctctctttcactgttttataaaaaagtgtatcggctagcctatctccggctaaatacactttgtgaacgccttctgtctgagcacccagaattagaacatatcatctggacccttttccagcacaccctgcagaatgagtatgaactcatgagagacaggcatttggaccaaattatgatgtgttccatgtatggcatatgcaaagtgaagaatatagaccttaaattcaaaatcattgtaacagcatacaaggatcttcctcatgctgttcaggagacattcaaacgtgttttgatcaaagaagaggagtatgattctattatagtattctataactcggtcttcatgcagagactgaaaacaaatattttgcagtatgcttccaccaggccccctaccttgtcaccaatacctcacattcctcgaagcccttacaagtttcctagttcacccttacggattcctggagggaacatctatatttcacccctgaagagtccatataaaatttcagaaggtctgccaacaccaacaaaaatgactccaagatcaagaatcttagtatcaattggtgaatcattcgggacttctgagaagttccagaaaataaatcagatggtatgtaacagcgaccgtgtgctcaaaagaagtgctgaaggaagcaaccctcctaaaccactgaaaaaactacgctttgatattgaaggatcagatgaagcagatggaagtaaacatctcccaggagagtccaaatttcagcagaaactggcagaaatgacttctactcgaacacgaatgcaaaagcagaaaatgaatgatagcatggatacctcaaacaaggaagagaaatgaggatctcaggaccttggtggacactgtgtacacctctggattcattgtctctcacagatgtgactgtataactttcccaggttctgtttatggccacatttaatatcttcagctctttttgtggatataaaatgtgcagatgcaattgtttgggtgattcctaagccacttgaaatgttagtcattgttatttatacaagattgaaaatcttgtgtaaatcctgccatttaaaaagttgtagcagattgtttcctcttccaaagtaaaattgctgtgctttatggatagtaagaatggccctagagtgggagtcctgataacccaggcctgtctgactactttgccttcttttgtagcatataggtgatgtttgctcttgtttttattaatttatatgtatatttttttaatttaacatgaacacccttagaaaatgtgtcctatctatcttccaaatgcaatttgattgactgcccattcaccaaaattatcctgaactcttctgcaaaaatggatattattagaaattagaaaaaaattactaattttacacattagattttattttactattggaatctgatatactgtgtgcttgttttataaaattttgcttttaattaaataaaagctggaagcaaagtataaccatatgatactatcatactactgaaacagatttcatacctcagaatgtaaaagaacttactgattattttcttcatccaacttatgtttttaaatgaggattattgatagtactcttggtttttataccattcagatcactgaatttataaagtacccatctagtacttgaaaaagtaaagtgttctgccagatcttaggtatagaggaccctaacacagtatatcccaagtgcactttctaatgtttctgggtcctgaagaattaagatacaaattaattttactccataaacagactgttaattataggagccttaatttttttttcatagagatttgtctaattgcatctcaaaattattctgccctccttaatttgggaaggtttgtgttttctctggaatggtacatgtcttccatgtatcttttgaactggcaattgtctatttatcttttatttttttaagtcagtatggtctaacactggcatgttcaaagccacattatttctagtccaaaattacaagtaatcaagggtcattatgggttaggcattaatgtttctatctgattttgtgcaaaagcttcaaattaaaacagctgcattagaaaaagaggcgcttctcccctcccctacacctaaaggtgtatttaaactatcttgtgtgattaacttatttagagatgctgtaacttaaaataggggatatttaaggtagcttcagctagcttttaggaaaatcactttgtctaactcagaattatttttaaaaagaaatctggtcttgttagaaaacaaaattttattttgtgctcatttaagtttcaaacttactattttgacagttattttgataacaatgacactagaaaacttgactccatttcatcattgtttctgcatgaatatcatacaaatcagttagtttttaggtcaagggcttactatttctgggtcttttgctactaagttcacattagaattagtgccagaattttaggaacttcagagatcgtgtattgagatttcttaaataatgcttcagatattattgctttattgcttttttgtattggttaaaactgtacatttaaaattgctatgttactattttctacaattaatagtttgtctattttaaaataaattagttgttaagagtcttaa

SEQ ID NO: 826 - DNA, 7150 bp, Homo sapiens
cgagcacagtgtatctggccggagcagtgcttatggcgatgctacagctgaggggcatccggctggaccaggaagtgtcagctcaagcactggagccatcagcaccaccactgggcaccaggagggagatggctccgagggagaaggagaaggagaaactgaaggagatgtccacactagcaacaggctgcacatggtccgtctaatgctgttggagagattactgcagaccctgcctcaattacgaaacgttggcggtgtccgggccatcccatacatgcaggtcattctaatgctcactacagatctggatggagaagatgagaaagacaagggggccctagacaacctgctctcccagcttattgctgagttgggtatggataaaaaggatgtctccaagaagaatgagcgcagcgccctgaatgaagtccatctggtagtaatgagactcctgagtgtcttcatgtcccgcaccaaatctggatccaagtcttccatatgtgagtcatcttccctcatctccagtgccacagcagcagctctactgagctctggggctgtggactactgcctgcacgtgctcaaatcactgctggaatattggaagagccaacagaatgacgaggagcctgtggctaccagccagttgctgaaaccacatactacctcctccccacctgacatgagcccattctttctccgccagtatgtgaagggtcatgctgctgatgtgtttgaggcctatactcagcttctaacagaaatggtactgaggcttccttaccaaatcaaaaagattactgacaccaattctcgaatcccacctcctgtctttgaccactcgtggttttactttctctccgagtacctcatgatccagcagactccatttgtgcgccgtcaagtccgcaaacttctgctcttcatctgtggatccaaagagaagtaccgccagctccgggatttgcacaccctggactctcacgtgcgtgggatcaagaagctgctagaagagcaggggatattcctccgggcaagtgtggttacagccagctcaggctccgccttgcaatatgacacactcatcagcctgatggagcacctgaaagcctgtgcagagattgccgcccagcgaaccatcaactggcagaaattctgcatcaaagatgactccgtcctgtacttcctcctccaagtcagtttccttgtggatgagggcgtgtccccagtgctgctgcaactgctctcctgtgctctgtgcggcagcaaggtgctcgctgcactggcagcctcttcgggatcctccagtgcttcttcctcctcagcccctgtggctgccagttctggacaagccacaacacagtccaagtcttccactaaaaagagcaagaaagaagaaaaagaaaaggagaaagatggtgagacctctggcagccaggaggaccagctgtgcacagctctggtgaaccagctgaacaaatttgccgataaggaaaccctgatccagttcctgcgttgtttcctgttagagtccaattcttcctcggtgcgctggcaggcccactgtctgacactgcacatctacagaaattccagcaaatctcaacaggagctcctgctagatctgatgtggtccatctggccagaactcccagcctatggtcgtaaggctgcccagtttgtggacctactaggatatttctccctgaaaactccacaaacagagaagaagttgaaggagtattcacagaaggctgtggagattctgcggactcaaaaccatattcttaccaaccaccccaactcgaacatttataacactttgtctggcttagtggagtttgatggctattacctggagagcgatccctgcctggtgtgtaataacccggaagtaccgttctgttatatcaagctgtcttccattaaagtggacacgcggtacaccaccacccagcaggttgtgaagctcattggcagtcacaccatcagcaaagtgacagtgaaaatcggggatctgaaacggaccaagatggtgcggaccatcaacctgtattataacaaccgaaccgtgcaggccatcgtggagttgaaaaacaagccagctcgctggcacaaagccaagaaggttcagctgacccctggacagacagaggtgaagattgacctgccgttgcccattgtggcctccaatctgatgattgagtttgcagacttctatgaaaactaccaggcctccacagagaccctgcagtgccctcgctgtagtgcctcggtccctgccaacccaggagtctgtggcaactgtggagagaatgtgtaccagtgtcacaaatgcagatccatcaactacgatgaaaaggatcccttcctctgcaatgcctgtggcttctgtaaatatgcccgcttcgacttcatgctctatgccaagccttgctgtgcagtggatcccattgagaatgaagaagaccggaagaaggctgtatccaacatcaatacacttttggacaaagctgatcgagtgtatcatcagctgatgggacaccggccacagctggagaacctgctctgcaaagtgaatgaggcagctccagaaaagccacaggatgactcaggaacagcagggggcatcagctccacttctgccagtgtgaatcgttacatcctgcagttggctcaggagtattgtggagactgcaagaactcttttgatgaactctccaaaatcatccagaaagtctttgcttcgcgcaaagagttgttggaatatgacctacagcagagggaagcagccactaaatcatcccggacctccgtgcagcccacattcactgccagccagtaccgtgccttatccgtcctgggctgtggccacacatcctccaccaagtgctatggctgcgcctcggctgtcacagaacattgtatcacactacttcgggccctggccaccaacccagccttgaggcacatccttgtctcccagggccttatccgggagctctttgattataatcttcgccgaggggctgcggccatgcgggaggaggtccgccagctcatgtgcctcctaactcgagacaacccagaagccacccaacagatgaatgacctgattattggcaaggtctccacagccctgaagggccactgggccaaccccgatctggcaagtagcctgcagtatgaaatgctgctgctgacggattctatctccaaggaggacagctgctgggagctccggttacgctgtgctctcagccttttcctcatggctgtgaacattaagactcctgtggtggttgaaaacattaccctcatgtgcctgaggatcttgcagaagctgataaaaccacctgctcccactagcaagaagaacaaggatgtccccgttgaggccctcaccacggtgaagccatactgcaatgagatccatgcccaggctcaactgtggctcaagagagaccccaaggcatcctatgatgcctggaagaagtgtcttcctatcagagggatagatggcaatgggaaagcccccagcaaatcagagctccgccatctctatttgactgagaagtatgtgtggaggtggaaacagttcctgagtcgtcgggggaagaggacctcccccttggatctcaaactggggcataacaactggctgcgacaagtgcttttcactccagcaacgcaggccgcacggcaggcagcctgtaccattgtggaagctctagccaccattcccagccgcaagcagcaggtcctggacctgcttaccagttacctggatgagctgagcatagctggggagtgtgcagctgagtacctggctctctaccagaagctcatcacttctgcgcactggaaagtctacttggcagctcggggagtcctaccctatgtgggcaacctcatcaccaaggaaatagctcgtctgctggccctggaggaggctaccctgagtaccgatctgcagcagggttatgcccttaaaagtctcacaggccttctctcctcctttgttgaggtggaatccatcaaaagacattttaaaagtcgcttggtgggtactgtgctgaatggatacctgtgcttgcggaagctggtggtgcagaggaccaagctgatcgatgagacgcaggacatgctgctggagatgctggaggacatgaccacaggtacagaatcagaaaccaaggccttcatggctgtgtgcattgagacagccaagcgctacaatctggatgactaccggaccccggtgttcatcttcgagaggctctgcagcatcatttatcctgaggagaatgaagtcactgagttctttgtgaccctggagaaggatccccaacaagaagacttcttacagggcaggatgcctgggaacccgtatagcagcaatgagccaggcatcgggccgctgatgagggatataaagaacaagatttgccaggactgtgacttagtggccctcctggaagatgacagtggcatggagcttctagtgaacaataaaatcattagtttggaccttcctgtggctgaagtttacaagaaagtctggtgtaccacgaatgagggagagcccatgaggattgtttatcgtatgcgggggctgctgggcgatgccacagaggagttcattgagtccctggactctactacagatgaagaagaagatgaagaagaagtgtataaaatggctggtgtgatggcccagtgtgggggcctggaatgcatgcttaacagactcgcagggatcagagatttcaagcagggacgccaccttctaacagtgctactgaaattgttcagttactgcgtgaaggtgaaagtcaaccggcagcaactggtcaaactggaaatgaacaccttgaacgtcatgctggggaccctaaacctggcccttgtagctgaacaagaaagcaaggacagtgggggtgcagctgtggctgagcaggtgcttagcatcatggagatcattctagatgagtccaatgctgagcccctgagtgaggacaagggcaacctcctcctgacaggtgacaaggatcaactggtgatgctcttggaccagatcaacagcacctttgttcgctccaaccccagtgtgctccagggcctgcttcgcatcatcccgtacctttcctttggagaggtggagaaaatgcagatcttggtggagcgattcaaaccatactgcaactttgataaatatgatgaagatcacagtggtgatgataaagtcttcctggactgcttctgtaaaatagctgctggcatcaagaacaacagcaatgggcaccagctgaaggatctgattctccagaaggggatcacccagaatgcacttgactacatgaaaaagcacatccctagcgccaagaatttggatgccgacatctggaaaaagtttttgtctcgcccagccttgccatttatcctaaggctgcttcggggcctggccatccagcaccctggcacccaggttctgattggaactgattccatcccgaacctgcataagctggagcaggtgtccagtgatgagggcattgggaccttggcagagaacctgctggaagccctgcgggaacaccctgacgtaaacaagaagattgacgcagcccgcagggagacccgggcagagaagaagcgcatggccatggcaatgaggcagaaggccctgggcaccctgggcatgacgacaaatgaaaagggccaggtcgtgaccaagacagcactcctgaagcagatggaagagctgatcgaggagcctggcctcacgtgctgcatctgcagggagggatacaagttccagcccacaaaggtcctgggcatttataccttcacgaagcgggtagccttggaggagatggagaataagccccggaaacagcagggctacagcaccgtgtcccacttcaacattgtgcactacgactgccatctggctgccgtcaggttggctcgaggccgggaagagtgggagagtgccgccctgcagaatgccaacaccaagtgcaacgggctccttccggtctggggacctcatgtccctgaatcagcttttgccacttgcttggcaagacacaacacttacctccaggaatgtacaggccagcgggagcccacgtatcagctcaacatccatgacatcaaactgctcttcctgcgcttcgccatggagcagtcgttcagcgcagacactggcgggggcggccgggagagcaacatccacctgatcccgtacatcattcacactgtgctttacgtcctgaacacaacccgagcaacttcccgagaagagaagaacctccaaggctttctggaacagcccaaggagaagtgggtggagagtgcctttgaagtggacgggccctactatttcacagtcttggcccttcacatcctgccccctgagcagtggagagccacacgtgtggaaatcttgcggaggctgttggtgacctcgcaggctcgggcagtggctccaggtggagccaccaggctgacagataaggcagtgaaggactattccgcttaccgttcttcccttctcttttgggccctcgtcgatctcatttacaacatgtttaagaaggtgcctaccagtaacacagagggaggctggtcctgctctctcgctgagtacatccgccacaacgacatgcccatctacgaagctgccgacaaagccctgaaaaccttccaggaggagttcatgccagtggagaccttctcagagttcctcgatgtggccggtcttttatcagaaatcaccgatccagagagcttcctgaaggacctgttgaactcagtcccctgaccaccacacagcagctgcggcggcgaagacgaagctggcttgccttccaccctctgttctccctccttgtgcattaagttccctccgcgggatgctgcattgttaccccgccctcccctctctcatttttcttggtgtggcttggggtttttaggcttcctgttttatctcgtgtgtgtggtgcaccagctatgaggttgtctgtaacccaagccatcaaagggcctgtacatacctaggagccatgagttgtcccggccagcttcatacttgagtgtgcacatcttgagaaataaacaagtgacttaacacacattg

SEQ ID NO: 827 - DNA, 6551 bp, Homo sapiens
ccagtggacgagaatcgcggagcctgcggggctggaggttgagcgcccgggccagcacctaggcgggcgcgggggtgtgcaggccagggttcgcgcgggccgggtggaggcttgagcggggacccccgagcttgagccccggagccggcggcgctggggccagaggggccggacgggaggtggcggaggtggcggcggaggcgaaggggcggcgggacgcgggcctggcccgtgtgtgtcctggcggcctggcccaggctgccgctgtacggtgagcccgagggaggcggatctgggtcccgggaaggacacccgcctggatttgccccttaggcccggcccgggcccctcgggagcagaacaaccttagtgaggtggacaggaggggacctcgcgagcagacgcgcgccagcgacagcagccccgccccggcctctcgggagccgtggggcagaggctgcggagccccagaagggtctaccagccacagtctctgcacgtttccaagagcagcagaaaatgaacacattgcaggggccagtgtcattcaaagatgtggctgtggatttcacccaggaggagtggcagcagctggaccctgatgagaagataacttacagggatgtgatgttggagaactatagccatctagtttctgtgggatatgataccaccaagccaaacgtcatcattaagttggagcagggagaggagccgtggataatgggaggtgaatttccatgtcaacatagtccagaagcctggagagttgatgacctgatagagagaatccaagaaaacgaagacaaacattcaaggcaagctgcttgtatcaatagcaaaaccctgactgaagagaaagagaatacatttagtcaaatttacatggaaacaagccttgttccttcaagcataatagctcataattgtgtctcatgtggaaagaatttagaatctatttcgcaattaattagtagtgatggaagctatgctaggacaaaacctgatgagtgtaatgaatgtgggaaaacatatcatggagagaaaatgtgtgaatttaatcaaaatggggatacctattctcacaatgaagaaaatattcttcagaaaattagtattttggagaaaccctttgaatataatgaatgcatggaagccttagacaatgaggctgtttttattgctcataagagagcttacataggggagaagccctatgagtggaatgattctggaccagacttcatacagatgtcaaattttaatgcatatcagagatcacaaatggaaatgaagccctttgaatgcagtgaatgtggaaaatccttctgtaaaaagtcaaaattcatcatccaccagagggctcacacaggagagaaaccttatgaatgtaatgtatgtgggaaatccttcagccaaaagggaaccctcactgtacatcggagatcacacttagaggagaagccctataaatgtaatgaatgtgggaaaaccttttgtcagaagttacacctcactcaacacctaagaactcattcaggagagaaaccctacgaatgtagcgaatgtgggaaaaccttctgccaaaagacacatctcaccctgcaccagaggaatcattcaggagagaggccctatccatgtaacgaatgtgggaaatccttctcccgcaagtctgctctcagtgaccatcagagaactcacacgggagagaagctttataaatgtaatgaatgtgggaaatcctactaccgaaagtctactctgattacacatcagagaacacacacgggagagaagccctatcagtgtagcgagtgtgggaaattcttttctcgggtgtcatacctcactatacattatagaagtcatttagaagagaaaccctatgaatgtaatgaatgtggcaaaaccttcaatttaaattcagccttcattagacatcggaaagtacacacagaagagaaatcccatgaatgtagtgaatgtggaaagttctctcagttgtatctcaccgaccatcatacagctcatttagaagagaaaccctatgaatgtaatgaatgtgggaaaaccttccttgtaaattcagccttcgatgggcaccagccacttccaaaaggggagaaatcctatgaatgtaatgtatgtggaaagttattcaatgagttgtcatactatactgaacattatagaagtcattcagaagagaaaccttatggatgtagcgaatgtgggaaaaccttttcccataattcatccctcttcagacatcaaagagtacacacaggcgagaaaccctatgaatgttacgaatgtggaaaattcttctctcagaaatcatatctcactatacatcatcgaattcattcaggagagaaaccctatgaatgtagtaaatgtggaaaagtcttctctcggatgtcaaacctcactgtccactacagaagccattcaggagagaaaccctatgaatgtaatgaatgtgggaaagtcttttctcagaagtcatacctcactgtacactatagaactcattcaggagagaaaccctatgaatgtaacgagtgtgggaaaaaattccaccacagatcagccttcaatagccatcagagaattcatagaagaggaaatatgaacgtacttgatgtggaaaatctctgaagtcagatctcaatttttagaaaactctctgaatataatgaatatggggaatccaataggaagtcaaagcgtttatctgagagttcgtgttcctgaacggtgagaagcatttaggcattagagtcattttaatccaaattttcacagagaagaatcccgaagaatgtaacaagaagcaaagccttcagcaagatcatacgactcatcggacactaatttatataggagtgaagttttataaatatttaatatttattttggattcaaattgtatttacatatcagggaatcatacaaaggcaaaatctgtcaatatggtgaatgtggaaaatatattgtcttggaaatttgttgtaaaagccatatttctaatggaaaatcaggtgtttacaggaaagatctcagaggctatgagctctgaataaatcttcattgtataaaatgaagtttttaaattgtcaggagttgatcatgaggacagtagcattaaataagtatatggccgttttttatcatgtcttaaaaatgcaatctaatggtaattctatgcaagtttggaattggatgacttgtgaagaggcagttttcttatttgagtattaggatggcaaaatgtattaagacaggacatattgttggtgagataatatttaataggtataaaatggtaaaatacctagttttctatttagaggaatttacaaatgggtttttaacaaatgcctcattagtacaggaggcagtcgttttgtaaagttttcaactgcatctgagtaagataagattttctaaaagactattttgataaactatacatacataatttggaattgtttaagtctatttcagtgaaagagaacaagcatactgcccatactctaaaatatccccagctctcacaccacccttgttttttaacccataggtttgagtgtgcctagtgccaatattttgtaatttagaaattttattcacaaacttctgtttggtacaaatacagtgtcattgttttgtgcattctcctttttcccagtatttcagaacaaattgattcaagtttctagcagatattttttgatcaattaacttaatgtcctcgctccatttcttgctggaacagtttaggtacctaccacttcttcacatgacacaggggaatcctgattagtcaaaataataatgatttcattctctttgccagtaacttgttttatagtggtcatatgacctgatactgggtaaacaaaacaaagatggacttgttctgggaaaaggtaaaatggtaatcaaatagattgtgttccaggaatgcaaaggtggcttaatattcacaagtcagttgctattatacaccacctgtagaaaagtaatctggcatgcagaacattcttgtggtacaattaatgttcgtttatgatcttagcaaatgatggattgaaagggacttacttaactgcataaagagacttaaactacaacaaacaatatgcttaatgatgaaatagtgaacatttctcctaagattataaaaataagacaaggatatctgctgtcaatgattttattcggcattgttcagaaggacctaaccagaaaactaatgcaaggaagagaaacaaaaggcatagagattagaaaagaagtaaaactttaaaaacgaaaaagaatataaatctctatttgcagatgccatgagtaaatttggtaagttccctgcataaaagttatgcaaaaagcattttatgatataccagcaaaaaacatggaaaatgaaattttgaaaagcaatgccacttcaaagatccctcaagtgcctagagggagaaaatgagttaatatgctttgaagaactgtatccagaaaataaaattacaaaggaggagagggataggattccaggacaatctcaaaactattgctttttcctaaattcattgcaaccttaaaatcctagcaagttctttaatgtaaattaacaagctaattctagaattcatatgcatattcaaaagtcgaataattgtcaaggctatcctgtagaatggacagagaggattgaaatttctaaatatcaagacctgttataaagccatagaaataatgaaggtgttaatttggcacaaggatgaaaaaactgactagtggaacagcatacagattcaaaagtagacccacgtgtataccatcacctgagttttgagaaaggtgacattgaagtgtagtgggggaaagggtgttctttccagtaaatgtactttgccaataaaattttgtaatttgataaaaagttatttggaggtggattgcagatctgaatatgaaatgtgaaagctttacaaagaaatcttaggacagtttgtaatcttggagtaagcaaaggtttattgagacccaaaaagcattaacccataaaattagaacttaatattaaatttgagaacttctatttatcagaaagaccaccagtaagaaaatgaacaggaaatcatggggaggagaagatatttgcagttcatgtatgtgacaacagcaccgagtatagcagaagtgttggcaaactttataaagcaaggcaccagatggtgaaaattttcagctttgtcacaactgctcatctttgctattgtgtgaaagcatccatacaccatgcattaaaaaaaaaatgagcatggctgcttcccagtaaaaccattcacaatcccaggtggcagtctggatttggtctgcactcatagttttctggtccctgatctcgaatatgtaaagagcacctacaaatcaacaagggggaaactggaaaaggcaaaagactttagaggatatccactcactttagaggatatccagacggccaataagcatgaaaagatgtgttagctttattagtaatcagggaaatgcaaacttaaaacatgtagcactgctacccatccatggaaatggttaaaatgaaaagcatgaaaaagcatcacgttttggcaaggatgtaagcaagaggaactgtacactactggtggaattgctcatcgataaaaccattttgaaagctggcactaaaagccaagcatatgtatactgttttacccaaacccagcaaaaatgcatgtgtctgtccaccaaaggacatgcactagaatatttatagcctaaaactgcacaaaacagaactatcttaaggcacatgtgcaatggaatgaataaagaagtggcatatgtccatggaatactgtaaaacagtgagcatgaatgaactagaagtccgtgtaataacgcagctgaatttaacaaaccttgctgaatgaaagactccagacacaaaagccaacatgctgtatgattccttctatataaattataaagacgggcaaaacttgtatacgtggtttaaaattagggtagcagttagccttggccaaggctgaaagggggcatttatctggtgctgggaataatctgtttctaaacctaggtgctaagtatttgagtgtgttttgagctgtgcacttaagatatgtgtatttttctgcatgtgtgttaaactttccataaaagttttctaaaatcacaaatggctaacatttgtgtcgctcatcactctaatcatatttttctagatgtgtatgaatatgctgcacaacaggaattaaatggcagattttgcataattctgtgcaggaaatacatatttatagtaattttgatggcaactactaagatttcctacgctgtccttaaagcttagcataatgtatattttaagtgaaatatttgagaaggttaaagaatcattacatactttgtcatcctatacttttgcatatataaataggtctgagctgcctcttcaataaagaagctaatgtgtaacatttcatatttccctaaac

SEQ ID NO: 828 - DNA, 3683 bp, Homo sapiens
aaggccgaaagtcttcggagcttgcgccagtctcttcgcggcgtccaccacttagacgcaagttgctgaagccggccggggagaaggtgttgttgccggagctgagaccgggcggccacagtccgcagggatgaacctcgagttgctggagtcctttgggcagaactatccagaggaagctgatggaactttggattgtatcagcatggctttgacttgcacctttaacaggtggggcacactgcttgcagttggctgtaatgatggccgaattgtcatctgggatttcttgacaagaggcattgctaaaataattagtgcacacatccatccagtgtgttctttatgctggagccgagatggtcataaactcgtgagtgcttccactgataacatagtgtcacagtgggatgttctttcaggcgactgtgaccagaggtttcgattcccttcacccatcttaaaagtccaatatcatccacgagatcagaacaaggttctcgtgtgtcccatgaaatctgctcctgtcatgttgaccctttcagattccaaacatgttgttctgccggtggacgatgactccgatttgaacgttgtggcatcttttgataggcgaggggaatatatttatacgggaaacgcaaaaggcaagattttggtcctaaaaacagattctcaggatcttgttgcttccttcagagtgacaactggaacaagcaataccacagccattaagtcaattgagtttgcccggaaggggagttgctttttaattaacacggcagatcgaataatcagagtttatgatggcagagaaatcttaacatgtggaagagatggagagcctgaacctatgcagaaattgcaggatttggtgaataggaccccatggaagaaatgttgtttctctggggatggggaatacatcgtggcaggttctgcccggcagcatgccctgtacatctgggagaagagcattggcaacctggtgaagattctccatgggacgagaggagaactcctcttggatgtagcttggcatcctgttcgacccatcatagcatccatttccagtggagtggtatctatctgggcacagaatcaagtagaaaactggagtgcatttgcaccagacttcaaagaattggatgaaaatgtagaatacgaagaaagggaatcagagtttgatattgaagatgaagataagagtgagcctgagcagacaggggctgatgctgcagaagatgaggaagtggatgtcaccagcgtggaccctattgctgccttctgtagcagtgatgaagagctggaagattcaaaggctctattgtatttacccattgcccctgaggtagaagacccagaagaaaatccttacggccccccaccggatgcagtccaaacctccttgatggatgaaggggctagttcagagaagaagaggcagtcctcagcagatgggtcccagccacctaagaagaaacccaaaacaaccaatatagaacttcaaggagtaccaaatgatgaagtccatccactactgggtgtgaagggggatggcaaatccaagaagaagcaagcaggccggcctaaaggatcaaaaggtaaagagaaagattctccatttaaaccgaaactctacaaaggggacagaggtttacctctggaaggatcagcgaagggtaaagtgcaggcggaactcagccagcccttgacagcaggaggagcaatctcagaactgttatgaagaccttcgaagttcttcattctttctcactttgccatcatgtggcctctggacactgtggtcagtcatttgaaaattgactttaatttaaaacaaaggcctgtgcctcccacccaggaggtgggagggtgaattttatgtttaaatgaagaagtgaattatggaagaagagtatacgaccttcccttccctttcaagcataagtccaaatagactctcaggaatgaagatttgtgaagacatcagataggaattttgactcatttaaactttgatgcttagttatgttgctggagaaaagatacttatgttttgctcatctaacttcattgtacccagcgtcattttgacatgtcatttcctatctcccatttgccttcggtcctcaatgcatgtctttgagtgacttcttatctgaaattttgctactggtatcctaggaaagcttttgttggatactctcattttaaacttctcctctccccagatacctcctatatttccatattgtgtgcaaaggatgggcagaaaagaaagtgcttgaaagatttcaaattttcagaaagggaacaacgaaggccctctcttcctctcataccacgttttgctcaagaagctgggctgtaacaattcagggttttcccttgttttcctctcattgcatgtttccctccaatattggttcattgtcatcaatcatggtttttgaagatagctagttttatccatctccagcaaagaatcatcaatagtttatattgctttacctgtgctggcttccagagatggaaacaaacccaggtgtctctcaacaagctacttttttactggggtgggggaatctatgcaaggagtaaagtaaaaccatccagaatcaaagcagcaaccacatagttcaaatcaaagatcaaggtgaattttttgtatcactgcctgtggaaatctatcctcatcagtcattgcatttttccctgcctatacctgtgctcctttttcttactgtgttttcagtcacttcctttctgtgaaaggttgcttagctttttttttgacatttgttgttctttataaaaataacagattggatagatgtgtacatttggtgtttgaaattctctgaaaatcccattaggaaaccaggtgtgaaaagggctcagtagcttctctgagtggcgtttttagctgactggaagtgcttaatctggatcgtcttttttttttttttttttttttcaatattttaaaaggagaatttaaatactgtgcttactgtgaaatatatcagttggtgagccgggcgtggtgggtcacgcctgtaatcccagcactttgggaggccaaggcgggttgatcacccgaggtcaggagttcaagaccagcctggccaacgtggtgaaagcctgtatctattaaaagacaaaaattagctgggcgtggtagtacatgcctgtaatcccagctacactggaggctgagtcaggagaatcacttgaacgtgggaggcagaggttgcagtgagtggagatcgcaccactgccctccagcctaggtgacagaatgagactctatctcaaaaaaaaaaaaaaaatgatatcagttggtggatgctcctataggtagccaaacacattgattacctgttagattttaggatagaaatcaaagtagagcacgtcagcaagagcctctttgtctcactccatcatttaaaaccagtatattcagtagttgaagaaagagctctccctgagtcagttgcaaaacgtctatatttttagatgccactacttttttcttaaatattcattttgagactgtcatgagttagaccagtggttgagattagtagatggctcactagacatgtttttgttttgcagacattatatccattccagtcctctgcactgtacactgcagcagtgtgcaaactatg

SEQ ID NO: 829 - DNA, 3871 bp, Homo sapiens
cgcaggctccctgcgggagcaggctgggctcagctccgctggacccgcgctggggaactctggcctcgctgcactcatggcttctcctagcaaggcagtgattgttcccgggaacggaggcggggatgtgaccacccacggctggtatggctgggtgaaaaaggagctggagaagatacctggtttccagtgtttggctaaaaacatgcccgacccaattacagcacgagagagcatctggctgcccttcatggagacagagctgcactgtgatgagaagactatcatcattggccacagttctggggccatcgcggccatgaggtatgcagaaacacatcgagtatatgctattgtattagtgtctgcgtacacatcagacttgggggatgaaaatgagcgtgcaagtggatacttcacccgcccctggcagtgggagaagatcaaggccaactgcccttacattgtgcagtttggctctactgacgacccgttccttccctggaaggaacaacaagaagtggccgataggttggaaaccaaattgcacaaattcactgactgtggccactttcagaacacagagtttcatgaactgattactgttgtaaagtctttgctgaaagtaccagcatagactgtatgatttctgctattttgcatcccaatataggagtagaataatatctactatcagctgattactagacacatagaacatccagttaagttccgtaagtgcctgaaaaacaaacacaagtttcaacattcaatctaagttacaaatagcacttccattttccatagactctaaaactccccaaattgctatgaactaccacagtattttcctcatttgataagaaacataaggacagcttaactacccttctctatccgaagtgagtcagaaacagaacccaggtttcttgattcccactcctgagtaaaattaaataggttttatgtatgttgcaggtattgcacacttttcctctttgaaatcaaacttttctatttcactggggaaagaaaacatgactgaaagtccagagtgttagcttagagctcaaaatactagctgctgtttcaagctggccccagacattaaactcagactagggccttcacctctgacacttgcccctaagtccttcagacatgttgagagagactgagacaggagtcttccggagtcaggcaggaaggagaagcacagcaatatacattcataatatacgtacaactgactagatttgtttgagacaagagtggtgggatcagagccatgtggagagctcatggcctgtctaaattgttgccatgtggaaatggggcagagtgttgccaattttctgattttttgtgtggaaaaaaatctccaaattgtagtttttaaatttggggaatgcaaatatatatatatatacacacacacacacacacatacacatacaatccatatacatatggagtatgtaagttggcaataacagtatacatcaaaaaatttacaaacactgcaagacaaataaaatccaagccatccatttgtgaccacagtcataagcattcacttagccaggggcttttagataattgtctgtgaagtctgagaaaagactaagataaccaagatgaacataatgtcaaaggacgaaatcatggggacaatttggattttgttccaaaagacaagtgtttttaaaaagaacctttccatacttcgtgttctgttctatagagttaaaccttttaacttccatggccctttagatctctttcaagcacattccattttcttctgatcatacttcctcagaaaacctttttttggctgggtgtggtggctcatgcctgtaatcccagcactgtgggaggctgaggtggttgtattgcttgaggccaggtgtttgaggccagccagggcaacacagcaagaccccatctctacaaaatattaaaacattagctaggcatggtggtgcacacctgtagtcctagcttcttgggaggctgaggcaggattgcttgagcccaggagtttgagccttcagtgagctatgatcgcgccactgtactccatcctgggtgatggagcgaagaacctgtctcttaaaaaaaaaaatttttttttaattaaaaaaacccaccctttttcatttcccaacattttttggctattatgatcgctatgtgttccttcaaataatttccagtgaatccacacttgatgttgcaaagcctaagtttgctgcagaaatacaatttcctacacttcatacctaaaggagattcagagctatcgctcaaaaccaaaagtcttggtttttaaatgtgcttagacaaaaaaaatcaggaaaggtaccctaatcgttcaacagcaatcatctttggggaatgggcattttggtaggtaaagtgtggtggacgtccttattattatttttgagacagtgtcttgctctgtctcccaggctggaggtcagtggcacaaatctcagctcactctaacctgcacctcccgggttcaagtgattctcatctcagcctcccaagtagtgtgaactaaaggcatgtgccaccacgcctggctaatttttgtatttttagtagagacagggtttcaccatgttggccaggctggtctcgaactcctggcctcaagtgatccacccacctcagccgcccaaagtgttgggattacaggcatgagccaccatgcccggccccttattttactttatcctcctgattatttgaatttgttacactaagcatgtattttataatcaaaaataattaagatttaaaacaatgtatttgactactaaaaagcaaattatataaatcagttgaataataatgttgttaaagaggctgtttagcactaatttgaccaaatctatagtcaaagtttgattctacttgaattttttggaaatttgctgttgtattacttattctttgccttgttctctgtgaagtcctttcctaaaaaagaaacttatacaatttagttcacaaaactttgttgacctctttctctgtagaaatgaaaactaaatatatataattgagaaataattctgatactcttcattcctataaaagtaattaagatagacctataggattgttgaactttgctgccaaatatagtaaccagtaaccacagctagctgtaaaattgaaaattcagttcagtcaaactagccatatttcaagtgctcaacagccactggtggctattggttaccttactgaccagccaatataggctatttccgtcattatagaaagctctattggacaacattggtctaggacatatattttgtattttcccctcacccaccatccaataatgagtaatagcacaaagtaaaagtgacttaatttgaaattacttctgtttggctagtttgcttagctgatcaccaccaacatcataggtctataaatcacccaactaagatcaggggtgtttcatgggaaaatctacacaaactattcattaaaaaccatagagccatggactgtcatttctgatttctgtttgattctttgtggtcatcattgaatatacaggggcctctatacactctggggagtatctattctcaggtgagcaaaataccgaatactgaatggaaatcaactgtaagtattaggacttcatatgcaacttgaatttttggtgctgtccggagtctagagccccacaatctgttttggttacagtttatccctgtaggataaatgatccatttaactattcatcagaggtgctgtaattttaaattgtctcttgtctccttcagttaattttcagaattaaaaacataccatgggaaaaaaaaaaaaaaaa

SEQ ID NO: 830 - DNA, 4270 bp, Homo sapiens
gcaggtggttgtgggtagcgcgcctgggagggagaaagaagtcgggggccgtggcgcgcagcccgcggggcctgaagggatgttcgaggacaagccccacgctgagggggcggcggtggtcgccgcagccggggaggcgctacaggccctgtgccaggagctgaacctggacgaggggagcgcggccgaagccctggacgactttactgccatccgaggcaactacagcctagagggagaagttacacactggttggcatgttcattatatgttgcatgccgcaaaagcattattcccacggttggaaagggtatcatggaaggcaactgtgtttcacttaccagaatactacgttcagctaaattaagtttaatacaattttttagtaaaatgaagaaatggatggacatgtcaaatctaccacaagaatttcgtgaacgtatagaaaggctagagagaaattttgaggtgtctactgtaatattcaaaaaatatgagccaatttttttagatatatttcaaaatccatatgaagaaccaccaaagttaccacgaagccggaagcagaggaggattccttgcagtgttaaggatctgtttaatttctgttggacactttttgtttatactaagggtaattttcggatgattggggatgacttagtaaactcttatcatttacttctatgctgcttggatctgatttttgccaatgcgattatgtgcccaaatagacaagacttgctaaatccatcatttaaaggtttaccatctgattttcatactgctgactttacggcttctgaagagccaccctgcatcattgctgtactgtgtgaactgcatgatggacttctcgtagaagcaaaaggaataaaggagcactactttaagccatatatttcaaaactctttgacaggaagatattaaaaggagaatgcctcctggacctttcaagttttactgataatagcaaagcagtgaataaggagtatgaagagtatgttctaactgttggtgattttgatgagaggatctttttgggagcagacgcagaagaggaaattggaacacctcgaaagttcactcgtgacaccccattagggaaactgacagcacaggctaatgtggagtataaccttcaacagcactttgaaaaaaaaaggtcatttgcaccttctaccccactgaccggacggagatatttacgagaaaaagaagcagtcattactcctgttgcatcagccacccaaagtgtgagccggttacagagtattgtggctggtctgaaaaatgcaccaagtgaccaacttataaatatttttgaatcttgtgtgcgtaatcctgtggaaaacattatgaaaatactaaaaggaataggagagactttctgtcaacactatactcaatcaacagatgaacagccaggatctcacatagactttgctgtaaacagactaaagctggcagaaattttgtattataaaatactagagactgtaatggttcaggaaacacgaagacttcatggaatggacatgtcagttcttttagagcaagatatatttcatcgttccttgatggcttgttgtttggaaattgtgctctttgcctatagctcacctcgtacttttccttggattattgaagttctcaacttgcaaccattttacttttataaggttattgaggtggtgatccgctcagaagaggggctctcaagggacatggtgaaacacctaaacagcattgaagaacagattttggagagtttagcatggagtcacgattctgcactgtgggaggctctccaggtttctgcaaacaaagttcctacctgtgaagaagttatattcccaaataactttgaaacaggaaatggaggaaatgtgcagggacatcttcccctgatgccaatgtctcctctaatgcacccaagagtcaaggaagttcgaactgacagtgggagtcttcgaagagatatgcaaccattgtctccaatttctgtccatgaacgctacagttctcctaccgcagggagtgctaagagaagactctttggagaggaccccccaaaggaaatgcttatggacaagatcataacagaaggaacaaaattgaaaatcgctccttcttcaagcattactgctgaaaatgtatcaattttacctggtcaaactcttctaacaatggccacagccccagtaacaggaacaacaggacataaagttacaattccattacatggtgtcgcaaatgatgctggagagatcacactgatacctctttccatgaatacaaatcaggagtccaaagtcaagagtcctgtatcacttactgctcattcattaattggtgcttctccaaaacagaccaatctgactaaagcacaagaggtacattcaactggaataaacaggccaaagagaactgggtccttagcactattttacagaaaggtctatcatttggcaagtgtacgcttacgtgatctatgtctaaaactggatgtttcaaatgagttacgaaggaagatatggacgtgttttgaattcactttagttcactgtcctgatctaatgaaagacaggcatttggatcagctcctcctttgtgccttttatatcatggcaaaggtaacaaaagaagaaagaacttttcaagaaattatgaaaagttataggaatcagccccaagctaatagtcacgtatatagaagtgttctgctgaaaagtattccaagagaagttgtggcatataataaaaatataaatgatgactttgaaatgatagattgtgacttagaagatgctacaaaaacacctgactgttccagtggaccagtgaaagaggaaagaggtgatcttataaaattttacaatacaatatatgtaggaagagtgaagtcatttgcactgaaatacgacttggcgaatcaggaccatatgatggatgctccaccactctctccttttccacatattaaacaacagccaggctcaccacgccgcatttcccagcagcactccatttatatttccccgcacaagaatgggtcaggccttacaccaagaagcgctctgctgtacaagttcaatggcagcccttctaagagtttgaaagatatcaacaacatgataaggcaaggtgagcagagaaccaagaagcgagtaatagccatcgatagtgatgcagaatcccctgccaaacgcgtctgtcaagaaaatgatgacgttttactgaaacgactacaggatgttgtcagtgaaagagcaaatcattaatgttgttcttgtttctatgataaaagcactttcagattgttctgcagaaagttggagctctgtccttcaaaccttttagccctatagatgataaatatcactgggttataagaaaaaattgcacaaaaattatgtgctttttaaaatatttatccaaaatgtagttgacagagatgtattttgagttggattggaaaggaatattttaagtgccttttaaaaatactaatagtccggccaggcgctgtggctcacgcctgtaatcccaggactttgggaggccaaggcgggcagatcaccggaggtcaggagttcgagaccagcctgaccaacatggagaaaccccatctctactaaaaatacaaaattagccgggtgtggtggcgcatgcctgtaatcccagctacttgggaggctgaggcagaattgcttgaacccaggaagcggaggttgtggtgagccaaggttgcgccactgcactccagcctgggcaacaagagtaaaactccatctcaaaaaatatatatatatatataaatagggaattttttttaatgtttgctccttgagttttcaagatgaaataaggagaaaccccataactttttagctctcttttaaaaataaatgtctccttctgtgttctgtaatatgaggataaataatctacttttgatagcatgctttgagatatttgtattcttaatttaatattgaaggaaggggttggttcccatagtacctggccagagggttatataccatcctgtctctggcccactgtggtaattccacatccaggtaccaccgccattcagagttgtctcaccccttctcgtgccttttctctccttgagctttataaacagatttgtacctgagccccagtgctacactcatccttgctttccagccctaagccatctcagcctgatgtcacaacccaataaatggggcactttcttcttttgtaaactattatca

SEQ ID NO: 831 - DNA, 4903 bp, Homo sapiens
gtcgtttgcggcggcgcaggcgcggtgcgggcggcggacgggcgggcgcttcgccgtttgaatggctgcgggcccgggccctcacctcacctgaggtccggccgcccaggggtgcgctatgccgtcgggaggtgaccagtcgccaccgcccccgcctccccctccggcggcggcagcctcggatgaggaggaggaggacgacggcgaggcggaagacgccgcgccgcctgccgagtcgcccacccctcagatccagcagcggttcgacgagctgtgcagccgcctcaacatggacgaggcggcgcgggccgaggcctgggacagctaccgcagcatgagcgaaagctacacgctggagggaaatgatcttcattggttagcatgtgccttatatgtggcttgcagaaaatctgttccaactgtaagcaaagggacagtggaaggaaactatgtatctttaactagaatcctgaaatgttcagagcagagcttaatcgaattttttaataagatgaagaagtgggaagacatggcaaatctacccccacatttcagagaacgtactgagagattagaaagaaacttcactgtttctgctgtaatttttaagaaatatgaacccatttttcaggacatctttaaataccctcaagaggagcaacctcgtcagcagcgaggaaggaaacagcggcgacagccctgtactgtgtctgaaattttccatttttgttgggtgctttttatatatgcaaaaggtaatttccccatgattagtgatgatttggtcaattcttatcacctgctgctgtgtgctttggacttagtttatggaaatgcacttcagtgttctaatcgtaaagaacttgtgaaccctaattttaaaggcttatctgaagattttcatgctaaagattctaaaccttcctctgaccccccttgtatcattgagaaactgtgttccttacatgatggcctagttttggaagcaaaggggataaaggaacatttctggaaaccctatattaggaaactttatgaaaaaaagctccttaagggaaaagaagaaaatctcactgggtttctagaacctgggaactttggagagagttttaaagccatcaataaggcctatgaggagtatgttttatctgttgggaatttagatgagcggatatttcttggagaggatgctgaggaggaaattgggactctctcaaggtgtctgaacgctggttcaggaacagagactgctgaaagggtgcagatgaaaaacatcttacagcagcattttgacaagtccaaagcacttagaatctccacaccactaactggtgttaggtacattaaggagaatagcccttgtgtgactccagtttctacagctacgcatagcttgagtcgtcttcacaccatgctgacaggcctcaggaatgcaccaagtgagaaactggaacagattctcaggacatgttccagagatccaacccaggctattgctaacagactgaaagaaatgtttgaaatatattctcagcatttccagccagacgaggatttcagtaattgtgctaaagaaattgccagcaaacattttcgttttgcggagatgctttactataaagtattagaatctgttattgagcaggaacaaaaaagactaggagacatggatttatctggtattctggaacaagatgcgttccacagatctctcttggcctgctgccttgaggtcgtcactttttcttataagcctcctgggaattttccatttattactgaaatatttgatgtgcctctttatcatttttataaggtgatagaagtattcattagagcagaagatggcctttgtagagaggtggtaaaacaccttaatcagattgaagaacagatcttagatcatttggcatggaaaccagagtctccactctgggaaaaaattagagacaatgaaaacagagttcctacatgtgaagaggtcatgccacctcagaacctggaaagggcagatgaaatttgcattgctggctcccctttgactcccagaagggtgactgaagttcgtgctgatactggaggacttggaaggagcataacatctccaaccacattatacgataggtacagctccccaccagccagcactaccagaaggcggctatttgttgagaatgatagcccctctgatggagggacgcctgggcgcatgcccccacagcccctagtcaatgctgtccctgtgcagaatgtatctggggagactgtttctgtcacaccagttcctggacagactttggtcaccatggcaaccgccactgtcacagccaacaatgggcaaacggtaaccattcctgtgcaaggtattgccaatgaaaatggagggataacattcttccctgtccaagtcaatgttggggggcaggcacaagctgtgacaggctccatccagcccctcagtgctcaggccctggctggaagtctgagctctcaacaggtgacaggaacaactttgcaagtccctggtcaagtggccattcaacagatttccccaggtggccaacagcagaagcaaggccagtctgtaaccagcagtagtaatagacccaggaagaccagctctttatcgcttttctttagaaaggtataccatttagcagctgtccgccttcgggatctctgtgccaaactagatatttcagatgaattgaggaaaaaaatctggacctgctttgaattctccataattcagtgtcctgaacttatgatggacagacatctggaccagttattaatgtgtgccatttatgtgatggcaaaggtcacaaaagaagataagtccttccagaacattatgcgttgttataggactcagccgcaggcccggagccaggtgtatagaagtgttttgataaaagggaaaagaaaaagaagaaattctggcagcagtgatagcagaagccatcagaattctccaacagaactaaacaaagatagaaccagtagagactccagtccagttatgaggtcaagcagcaccttgccagttccacagcccagcagtgctcctcccacacctactcgcctcacaggtgccaacagtgacatggaagaagaggagaggggagacctcattcagttctacaacaacatctacatcaaacagattaagacatttgccatgaagtactcacaggcaaatatggatgctcctccactctctccctatccatttgtaagaacaggctcccctcgccgaatacagttgtctcaaaatcatcctgtctacatttccccacataaaaatgaaacaatgctttctcctcgagaaaagattttctattacttcagcaacagtccttcaaagagactgagagaaattaatagtatgatacgcacaggagaaactcctactaaaaagagaggaattcttttggaagatggaagtgaatcacctgcaaaaagaatttgcccagaaaatcattctgccttattacgccgtctccaagatgtagctaatgaccgtggttcccactgaggttagtctcttgtattaaactcttcacaaaatctgtttagcagcagcctttaatgcatctagattatggagcttttttccttaatccagctgatgagttacagcctgttagtaacatgaggggacattttggtgagaaatgggacttaactccttccagtgtccttagaacattttaattcatcccaactgtctttttttccctaccattcagtgattactgtcaaggctgcttagaatccaaacttggatttttgactctggcaaagcttttagaaatactgcaagaaaatgatgtgtacccaaacgtgagcataggaggcttctgttgacgtactccaacagaagaactgtgtttcaagttcaatcctacctgttttgtggtcagctgtagtcctcataaaaagcaaaacaaaaattaggtattttgtcctaaaacacctggtaggagtgtgtgattttttgcattcctgacaaaggagagcacacccaggtttggaggtcctaggtcattagccctcgtctcccgttccctttgtgcacatcttccctctccccattcggtgtggtgcagtgtgaaaagtccttgattgttcgggtgtgcaatgtctgagtgaacctgtataagtggaggcactttagggctgtaaaatgcatgattttgtaacccagattttgctgtatatttgtgatagcactttctacaatgtgaactttattaaatacaaaacttccaggctaaacatccaatattttctttaatgcttttatatttttttaaaatgttaaaacccctatagccaccttttgggaatgttttaaattctccagttttttgttatatagggatcaaccagctaagaaaagattttaatcaagttgaattgaggggattaatatgaaaacttatgacctcttcctttaggagggagttatctaaaagaaatgtctattaaggtgatatatttaaaaatatttttgggtgttcctggcagtttaaaaaaattggttggagaatttaggtttttattagtaccatagtaccatttatacaaattagaaaatgttatttaacagctgaattatctatacatatctttattaatcactattgttccagcagttttcaagtcaaattaataatcttattagggagaaaattcaattgtaaattgaatcagtataaacaaagttactaggtaacttcatattgctgagagaaatatggaacttacattgttcaattagaatagtgttctgcaaaaatatttataaaacttctcaagatactgctactgtaattttatatgaagataagtgtatttttcaataaagcatttataaattaaaaaaaaaaaaaaaaaa

SEQ ID NO: 832 - DNA, 1655 bp, Homo sapiens; identical to SEQ ID NO: 499

SEQ ID NO: 833 - DNA, 2630 bp, Homo sapiens
ggttccagcgacagcagcactggactcgtccagagggcggcgggtgagcggctggggccccgtggagccaccatggaccccgcaggggcagcagacccctcagtgcctcccaatcctttgactcacctgagcctgcaggacagatcagagatgcagctgcagagcgaagccgacaggcggagcctcccgggcacttggaccaggtcatccccagagcacaccaccattctgaggggaggcgtgcgcaggtgcctgcagcaacagtgtgaacagactgtgcggatcctgcatgccaaggtggcccagaaatcatacggaaatgagaagcggttcttctgccccccgccctgtgtctacctctcggggcctggctggagggtgaagccagggcaggatcaagctcaccaggcgggggaaacggggcccacggtctgcggttacatgggactggacagcgcgtccggcagcgccactgagacgcagaagctgaatttcgagcagcagccggactccagggaattcggctgcgccaagaccctgtacatctcagatgcagacaagaggaagcactttcggctggtgctgcggctggtgctgcgcgggggccgggagctgggtaccttccacagccgccttatcaaggtcatctcgaagccctcgcagaagaagcagtcgctgaaaaacaccgatctgtgcatatcctccggctcaaaggtctccctcttcaaccgcctgcgctctcagacggtctccacacgctacctctctgtggaggatggggcctttgtggccagtgcacgacagtgggctgccttcacgctccacctggctgatgggcactctgcccaaggagacttcccaccgcgagagggctacgttcgctatggctccctggtgcagctcgtctgcacggtcaccggcatcacactacctcccatgatcatccgtaaagtagcaaaacagtgtgcgctccttgatgtggatgagcccatctcccagctgcacaagtgtgcattccagtttccaggcagtcccccaggagggggtggcacctacttatgccttgccacagagaaggtggtgcaatttcaggcctctccctgccccaaggaggcgaacagggctctgcttaacgacagctcttgctggaccatcatcggcaccgagtcggtggaattttccttcagcaccagcctggcgtgtaccctggagccggtcactccggtgcctctcatcagcaccctagagctgagcggcgggggcgacgtggccacgctggagctccacggagagaacttccacgcggggctcaaggtgtggtttggggacgtggaggcagaaaccatgtacaggagcccgcggtccctggtgtgcgtggtgccggacgtggcggccttctgcagcgactggcgctggctgcgcgctcccatcacaatccccatgagcctggtgcgcgccgacgggctcttctaccctagtgccttctccttcacctacaccccggaatacagcgtgcggccgggtcaccccggcgtccccgagcccgccaccgacgccgacgcgctcctggagagcatccatcaggagttcacgcgcaccaacttccacctcttcatccagacttaggcgcgcccggtagccccggctgcccaccctggagggctgcgcccgcgccaggcgcggggacgtgtttctgggttctaggccctgcttccttgcccctttgctgcagaagggcagctgaaggctcaccctagaaaccgggcctggtgggtcttacccggctcactccctcccttgtccttacacatacaggaagacaagacctgagtggtgctgtctttgtgtccgtcgtgtatggctctccctgtcttcatttcttctcactctgtctctaaacctctctctctctcccttccccctcagtacttagtctacagacctatgtgcgtgtccctatccttctgtccttttctctcttcagctctccctgcctctcacacacaattttacatgccccgaggagccaagtttgggacatttaccctccaggcatctgtgtcccctcttgaagagaaaacacacagcttcacacatccaggcatagggggcaagctcttggggcatcaggaccctggagcaccaggtccttcctggaatattagatccacctggagcaccgggtctctctaagtctcacctggggaattcggtcccacctggggcaccagttcccacctagagcactgtgtcctgccctagagcacaaagacctgctcctcccgagactctctctgactgcagccaggcatagtacctttgcctgtgtttgctccctggtccacagatttggtggctgggcaggtgcctggacagtgatgaggtcttgccgccttaactgtcccccccagtcacttctcccacaggcccagcaggacgcagtcctgaggatcagggattctacagctgcattaaaatcaatcctatccaaaaaaaaaaaaaaaaaaaaaaaaaaaaaaaaaaaaaaaaaaaaaaaaaaaaaaaaaaaaaaaaaaaaaaaaaaaaaaaaaaaaaaaaaaaaaaaaaaaaaaaaaaaaaaaaaaaaaaaaaaaaaaaaaaaaaaaaaaaaa

SEQ ID NO: 834 - DNA, 5537 bp, Homo sapiens
atggtggagaagggccccgaggtctcagggaagcggagagggaggaacaacgcggccgcctccgcctccgccgccgccgcctccgccgccgcctcggccgcctgcgcctcgccagccgccactgccgcctcgggcgccgccgcctcctcagcctcggccgccgccgcctcagccgccgccgcccccaataatggccagaataaaagtttggcggcggcggcgcccaatggcaacagcagcagcaactcctgggaggaaggcagctcgggctcgtccagcgacgaggagcacggtggcggtggcatgagggtcggaccccagtaccaggcggtggtgcccgacttcgaccccgccaaactggcaagacgcagtcaagaacgggacaatcttggcatgttggtctggtcacccaatcaaaatctgtcagaagcaaagttggatgaatacattgccattgccaaagaaaagcatgggtacaacatggaacaggctcttgggatgctcttctggcataaacataatatcgaaaagtcattggctgatttgcccaactttacccctttcccagatgagtggactgtggaagataaagtcttatttgagcaagcctttagttttcatgggaaaacttttcatagaatccaacaaatgcttccagataaatctatagcaagtctggtgaaattttactattcttggaagaagacgaggactaaaactagtgtgatggatcgccatgcccggaaacaaaaacgggagcgggaggagagcgaggatgaactggaagaggcaaatggaaacaatcccattgacattgaggttgatcaaaacaaggaaagcaaaaaggaggttccccctactgagacagttcctcaggtcaaaaaagaaaaacatagcacacaagctaaaaatagagcaaaaaggaaacctccaaaaggaatgtttctttctcaagaagatgtggaggctgtttctgccaatgccactgctgctaccacggtgctgagacaactagacatggaattggtttcagtcaaacgacagatccagaatattaaacagacaaacagtgctctcaaagaaaaacttgatggtggaatagaaccatatcgacttccagaggtcattcagaaatgtaatgcacgttggactacagaagagcagcttctcgccgtacaagccatcaggaaatatggccgagattttcaggcaatctcagacgtgattgggaacaaatcagtggtacaagtgaaaaacttttttgtaaattatcgacgccgcttcaacatagatgaagttttacaagaatgggaggcagaacatggtaaagaagagaccaatgggcccagtaaccagaagcctgtgaagtccccagataattccattaagatgcccgaagaggaagacgaggctcctgttctggatgtcagatatgcatctgcctcctgagaaactggtggctttgaacacttggtgtggactactgtgttatccgggatatcaggtattatgagacatcacctagccatctgcatcacatctctctggacaagcagctattaccaaaaaaggcatatacttccagtcctgtgctccatctgccttaattctttgctcgttcctccatgttggcgccacttcccagagagctccactgcatctcacactctgcccacgtgctggggaagtctcacggcctgcacatctcttgtgactctgggaaccgcctctcccgccggagcccccgagccccaccaatggcagctcttcccagtcagcagcttcagagcaggcagtctccttggaaggcccgactctgttcctgcatggcctgcagtttctactttgtgcatagagtcattttcagagtcaccgcgaccctgttggccttctagaaagtttcttttgttcttttctgagacaaccacctaagtgataatacgcttttttggaaactaatatatattgccagactgcatcataacctttatcatgccaagcatcctgatgcaactcacatttccctaaacatggggtacagttatgatttataaattgagttggcttaaatctccctcttctcccttcccaagtgttacaaagatcatttactgcaactgtcgttggacactgtagcttaaagggaacgtggacctcaatgctttctgccttcaacttttcagcattgtgaccccagggtggttgccaccccatcttttcctgaccccccccacccccccacctccaagaggttcggcccacatcactgtacctggtgcttgtaaatttggaattggtgccttctccttttggcaaccatggttatcaatcctttttctgttttagtgtcttatttcttctttcaagttatttgctagccaaagatgacatcactgagattaggagacaggggagagcttgctgcagattctgacagtgcagattttaaatgtcaggatattagaatagctggcgctggtttatgaaagctgcgcgttgttccgcgttctctcggtgtgcctggccttttatgtggcactctgtatgtcagtttgtgtccttcatgtgctgatgtgattacacaaacaccatgcactctcttttcatatcagagtacaggacagagaagtgatcaatgtattggtctagtgagactgagatgaaaagaaataacctacagagtggtctgtaatgccttttggttggactgggaacaagtaaaaatttctaataaacattttgagacttccagaatcacttttgttatcttatcagaccatgggcctgctgagggttgagcagacagcctgcattctaacataccctgttcccaccccacggccattcagactgcactcaatacgctgaagtcgcttttgttgttgttgttgttgtttgcatcatttggatttttttcctgctttcaataccaaaaaaatgcagatgctttaaggcctaaacagaattctgaagaatttaaaatatgcaattaaagtttgatatgttttgtctcccaagcaccttgttttttgttgttgttgttgttgttgaagtcagctgattttctctttagaaagagggtcagctagaaacctaggttttttggaattgtaaatttttttttagtatagtctggagagaaaggtcattcaaaaggaaagtacaatgggacttgctgcccttcatcatctcgttcccgtgccaggtgtgtgttggtcacgtaaaagcctgggaagcatcagaggagtcccggattgctgctgctacctggagacagggttagcaaaataacactagtgatgagggagaggcttcttttcaccataagcctgctgtgtacaccgagggcggcaggagaagcatgggaaggagtcagcctaagtttgcacattgcataaagggtacactaaggtatgagctgaagctttaggttctccgtgcttccctcaagacctccttcttgctaacagaagcagtaggcaattgctgcagtgcgtttctcaccctgccaataggtctgtctgtatctctgttaaggaaaatagcctggtccctcctggcagtgcttggaagcttgatgctaatttttatatagcgtggcaaactgaccagcagtgccaggccttgatctgtattctgcactatccctttacttggttcctggcactgaatggtctccagccctgaagaatcacgtgtgatcacagcagctgacctgggctttctccccgagaggaaggggcatgtcatttttatttgacagagggaaaatgggagctgtccttgactgcctttgttgtgctttcccgcgtaagatagcactgtgttttaaactgttgcattacactgtctttgcaatgatgtaaatgtaagaaatcacttagctttaaaagcgcagtggtttgatcttatttatatgaagactttttaacatatcaagaattaggtgcattggcaggtagggtttggggtgtgataactgcttcagatggaatgttcacttaagctttgtcttcttaaaaattatcaatgtgaatgtcataattatatatatttttgtggaaaattttctcctaagtataagttattgtgcaaaatatagtgtcattgatgcaaataatagtttaacttttagtttagaactcctaaaagatataaattgtattgcatatgcattaaaagtttgttttatttaattttatgtagatgtgtgaagtgttaggtaaaatttttttcacttatccatttaaacaccttgttacttgaatattgtgttgactggtctgcaacagtgatccattctgtaatatagctcttttaactgggaaggaaccacaccccagttgtgccgattacattagtgttggcacacagtcgggtgctagtgtaacacaaatgccgcgttgtctgggtgtacagtgtttgtggagacgccacttcctcaaaatggtttttgattgtttttaacctataagacgttctgatgctcacaaacctctattcaacacacaaaacaaacatgaaaaggtagttagttgggttgtaacagcttactggggtggactcataaaacagtggctttctgttcatctaaagtttcctcagataccacagaccactgttaagtgtgctcattgtcactttaaatttcaacgataccctatttttgtcattctaaatatcagatgtactattggtataattgcacaccaaaaataagccaaacagtgcattacgctaactggatccctgcttttatgtgagctaaggaaagatggagccaactccaacgagggcctctttttctctcttgtctagcctgtttctaaaccgaatgatccaggattcaagcttctattgtcaagtgaaactttcctcagatggactccaggtagccaggtcacctaaacctagtggtcctgtgcgatgctctttctgccagtccctgaatctctgcagcttctcttacctgtcttacctgtagtaaagcacaattgcagtggcgtcgcattcagaagaagggaaggtcagcagaggctatgcatgttgtgtgatgatgagtgtttacagccaccttctcctaaaacgaaatttataccggggtggatagtattccattaggtagacttatcgactttgctaagtgctttttagacagcttaaaaaattttcaagattttaaaagatgtataaggttaagtttgcaaatataatggaaatgctgtatatcttttgaagtgatgaaatccacgttggaattttaaagaaaatatgttgtaataatgctgttgtaagtaatattttaatgtctctttgcctgttttctatttcagcacattcattgtggtgaatgttcatagcattataactgcttagccattgaatgataacatttgttagtggaaattggaaaatttatttgtgaaattctgcagaattcatttttctatttccaatatttgctgaggttaaataaaaattttcaagccattgatgtaataaaatatgaaatgaaagcaaaaaaaaaaaaaaaaaaa

SEQ ID NO: 835 - DNA, 1217 bp, Homo sapiens
gccctccacaaagctcctgggcccctcctcccttcaaggattgcgaagaactggtcgcaaatcctcctaagccaccagcatctcggtcttcagctcacaccagccttgagcccagcctgcggccaggggaccacgcacgtcccacccacccagcgactccccagccgctgcccactcttcctcactcatggggaacagcaaaagtggggccctgtccaaggagatcctggaggagctgcagctgaacaccaagttctcggaggaggagctgtgctcctggtaccagtccttcctgaaggactgtcccaccggccgcatcacccagcagcagttccagagcatctacgccaagttcttccccgacaccgaccccaaggcctacgcccagcatgtgttccgcagcttcgattccaacctcgacggcaccctggacttcaaggagtacgtcatcgccctgcacatgaccaccgcgggcaagaccaaccagaagctggagtgggccttctccctctacgacgtggacggtaacgggaccatcagcaagaatgaagtgctggagatcgtcatggctattttcaaaatgatcactcccgaggacgtgaagctccttccagacgatgaaaacacgccggaaaagcgagccgagaagatctggaagtactttggaaagaatgatgatgataaacttacagagaaagaattcattgaggggacactggccaataaggaaattctgcgactgatccagtttgagcctcaaaaagtgaaggaaaagatgaagaacgcctgatgccaactgttcagctgtcctccctccacctaccactcacatgacacccgtgagcgcctgtgcacacacacacacatgcacacacacgcgcgcgcacacacacacacacacatccaccccagggccaagagaaaggcctgcacacaagcccacagcacagctccctgccaaactgaagcatctgtagtgacccactggttccttcttcctgggtcttcagcattccctcccatcatgcccggtcccacccctccctctgtccaccagcccatggccctgtgctaatcccaggattaggccataggagtcctaagtgtcaccccgctgtaagctcctttgtggagtgctgggtaagcagtttccaataaacgcaagctgagctgggaaaaaaaaaaaaaaaaaaaaaaaaaaaaaaaaaaaaaaaaaa

SEQ ID NO: 836 - DNA, 2592 bp, Homo sapiens
ggtggacggcgacgctgggtgacccggggtgcaagaattcaggggttgggaaggtgtgagccgcaaacccagcggagggcgggaagaaggaggaggcctctagggtggtcgggggactgggggccccgccggcagaggtccctcggcctcctgactgactgactgcggccgcctccggccaggacgctgggagctgcctgcgggaaggtgcggggagcggagccatggcctccggtgcgtataacccgtatatagagataattgaacaacccaggcagaggggaatgcgttttagatacaaatgtgaagggcgatcagcaggcagcattccaggggagcacagcacagacaacaaccgaacatacccttctatccagattatgaactattatggaaaaggaaaagtgagaattacattagtaacaaagaatgacccatataaacctcatcctcatgatttagttggaaaagactgcagagacggctactatgaagcagaatttggacaagaacgcagacctttgtttttccaaaatttgggtattcgatgtgtgaagaaaaaagaagtaaaagaagctattattacaagaataaaggcaggaatcaatccattcaatgtccctgaaaaacagctgaatgatattgaagattgtgacctcaatgtggtgagactgtgttttcaagtttttctccctgatgaacatggtaatttgacgactgctcttcctcctgttgtctcgaacccaatttatgacaaccgtgctccaaatactgcagaattaaggatttgtcgtgtaaacaagaattgtggaagtgtcagaggaggagatgaaatatttctactttgtgacaaagttcagaaagatgacatagaagttcgttttgtgttgaacgattgggaagcaaaaggcatcttttcacaagctgatgtacaccgtcaagtagccattgttttcaaaactccaccatattgcaaagctatcacagaacccgtaacagtaaaaatgcagttgcggagaccttctgaccaggaagttagtgaatctatggattttagatatctgccagatgaaaaagatacttacggcaataaagcaaagaaacaaaagacaactctgcttttccagaaactgtgccaggatcacgtagaaacagggtttcgccatgttgaccaggatggtcttgaactcctgacatcaggtgatccacccaccttggcctcccaaagtgctgggattacagttaattttcctgagagaccaagacctggtctcctcggttcaattggagaaggaagatacttcaaaaaagaaccaaacttgttttctcatgatgcagttgtgagagaaatgcctacaggggtttcaagtcaagcagaatcctactatccctcacctgggcccatctcaagtggattgtcacatcatgcctcaatggcacctctgccttcttcaagctggtcatcagtggcccaccccaccccacgctcaggcaatacaaacccactgagtagtttttcaacaaggacacttccttctaattcgcaaggtatcccaccattcctgagaatacctgttgggaatgatttaaatgcttctaatgcttgcatttacaacaatgccgatgacatagtcggaatggaagcgtcatccatgccatcagcagatttatatggtatttctgatcccaacatgctgtctaattgttctgtgaatatgatgacaaccagcagtgacagcatgggagagactgataatccaagacttctgagcatgaatcttgaaaacccctcatgtaattcagtgttagacccaagagacttgagacagctccatcagatgtcctcttccagtatgtcagcaggcgccaattccaatactactgtttttgtttcacaatcagatgcatttgagggatctgacttcagttgtgcagataacagcatgataaatgagtcgggaccatcaaacagtactaatccaaacagtcatggttttgttcaagatagtcagtattcaggtattggcagtatgcaaaatgagcaattgagtgactcctttccatatgaattttttcaagtataacttgcaagatttaaatccttttaaatcttgataccacctatatagatgcagcattttgtatttgtctaactggggatataatactatatttatactgtatatataatactgactgagaatataatactgtatttgagaatataaaaaacttttttcagggaagaagcatacaactttggacatagcgaatacaaaattggaagctgtcataaaaagacaactcagaggccaggcgcaggggctcacacctgtaatcctagcactttgggaggccaaggcgggtggatcacttgagaccaggaattcgagaccagcctggccaacatggtgaaaccccgtctctactaaaaatacaaaaattagctgagcatggtggtacgtgcctgtactgtcagctacttgggaggctgaggcacaataattgtttgaacccaggaagcagaggttgcagtgagctgagatcacaccaccgcactccagcctgggtgacagagtgagactctgtctc

SEQ ID NO: 837 - DNA, 2411 bp, Homo sapiens
ggaacagggaagatggcggctgtggtggagaatgtagtgaagctccttggggagcagtactacaaagatgccatggagcagtgccacaattacaatgctcgcctctgtgctgagcgcagcgtgcgcctgcctttcttggactcacagaccggagtagcccagagcaattgttacatctggatggaaaagcgacaccggggtccaggattggcctccggacagctgtactcctaccctgcccggcgctggcggaaaaagcggcgagcccatccccctgaggatccacgactttccttcccatctattaagccagacacagaccagaccctgaagaaggaggggctgatctctcaggatggcagtagtttagaggctctgttgcgcactgaccccctggagaagcgaggtgccccggatccccgagttgatgatgacagcctgggcgagtttcctgtgaccaacagtcgagcgcgaaagcggatcctagaaccagatgacttcctggatgacctcgatgatgaagactatgaagaagatactcccaagcgtcggggaaaggggaaatccaagggtaagggtgtgggcagtgcccgtaagaagctggatgcttccatcctggaggaccgggataagccctatgcctgtgacatttgtggaaaacgttacaagaaccgaccaggcctcagttaccactatgcccactcccacttggctgaggaggagggcgaggacaaggaagactctcaaccacccactcctgtttcccagaggtctgaggagcagaaatccaaaaagggtcctgatggattggccttgcccaacaactactgtgacttctgcctgggggactcaaagattaacaagaagacgggacaacccgaggagctggtgtcctgttctgactgtggccgctcagggcatccatcttgcctccaatttacccccgtgatgatggcggcagtgaagacataccgctggcagtgcatcgagtgcaaatgttgcaatatctgcggcacctccgagaatgacgaccagttgctcttctgtgatgactgcgatcgtggctaccacatgtactgtctcaccccgtccatgtctgagccccctgaaggaagttggagctgccacctgtgtctggacctgttgaaagagaaagcttccatctaccagaaccagaactcctcttgatgtggccacccacctgctccccgacatatctaaggctgtttctctcctccacttcatatttcatacccatctttcccttcttcctcctctccttcacaaatccagagaaccttggggtggttgtgccagcctgcctttggcagctgcaagctgaggtggcagctctgaccacctctggccccaggccctcagggagaaaggagcaacacactgcccctaggcgtgcgtgtggcccagtttctctctgctctccattaagtgcattcactctgcttgccttgggcccagcccctggtgatcacagggttcaaacagtgtcctcctagaaagagtgggagagcagctcacttctctgtgttctgcctcccctctggtctccagagttttcctgtcctctagaggcaagccaggccagggagctgggagcgagcaagctgaggccacgtccacaaggagcttttcatgcccctgtgccgcatagcctcacctctttcctccagagtggctctctgcggccctgtgttcctgctacagagtgttcttttctggagtcaggatgttctcggtcaccctcctggttctgccctgtcccattccaccccaccccagggggaacagtagcttcaccttgttattcccattgctctcctggctcactcttacggtcggtctccagtgactgaagcattccccacccttggaatttctcatcttctgcctcccttcctactccttttggttttgtggggagaggggaaggatcagggggccaggccagcagctcgggggccacaaggagatggataatgtgcctgttttttaacacaacaaaaaagcctacctccaaaatcccctttttgttcttcctggacctgggcattcagcctcctgctcttaactgaattgggagcctctgccacctgccccgtgtatcctggctctcagctcatggggaagccacatagacatccctttcttcccttgcacgctcgctagcagctggtaaggtcttcacaccctgattcctcaagttttctgcttagtggcactgacattaagtagtggggggacagtccatgccaggacaccctggagtagccttcccccttggccgtgggcaggccctaactcactgtcgctttggagttgaggtgtcttttctttttctttctttagttcctgtattctaaacattagtaaaaataaatgtttttacacagaaa

SEQ ID NO: 838 - DNA, 8207 bp, Homo sapiens
agacgctcgcgagcaaccctccgcgctccggagcctcctcagcctcccgcacaccccgagacgctcgccccgctgggcctcggtccccgcctcctcccccgtccttttcccctctctcgctccccacattgtctctgcctcattttctctcctagttgaggattaaaaaaaaaaaaaaatcaccatcatcctcagggagccccctcgccctcggaaaacaaaaccagacatgatcctgggctcctgcttctgaaagatctgcccgaccgaggaggagggagcctaggttcaagtcgcaggaaaggtcacggcagggaagccccctcagcccctccgcgtcgcctccccgcgggccgcccctctcggccctgcgccccgcggccccgcagcctccgcgcggcctcccgccccatccccgccactttccccggagctgggccgcgaacacctcactattgatggtgtagcgctttaggggaaggaggtgattgtctaggagtaactgtatgtgcgctcagcaccgggtcacaaccaccgtgggatccacttacagagaagatttgtggagagcttcagcctgtttatggtgttactgagaaaggaattgtggccatttgatataattctggatggaagacctcttatttgtattacattgaattagagcatttttgaaacgttggggttgttggagtggttggattttccctggaattgagtgagaaattcagaagactgaagcccaggcttactgtctacctttcacggaggcctagccgtgagaggacagaagaaggcacgtggcgaatcatgacagcggacaaagacaaagacaaagacaaagagaaggaccgggaccgagaccgggaccgagagagagagaaaagagacaaagcaagagagagtgagaattcaaggccacgccggagctgtaccttggaaggaggagccaaaaattatgctgagagtgatcacagtgaagacgaggacaatgacaacaatagtgccaccgcagaggagtccacgaagaagaataagaagaaaccaccgaaaaaaaagtctcgttatgaaaggacagataccggtgagataacatcctacatcactgaagatgatgtggtctacagaccaggagactgtgtgtatatcgagagtcggaggccaaacacaccgtatttcatctgtagcattcaagacttcaaactggtccacaactcccaggcctgttgcagatctccaactcctgctttgtgtgaccccccagcatgctctctgccggtggcatcacagccaccacagcatctttctgaagccgggagagggcctgtagggagtaagagggaccatctcctcatgaacgtcaaatggtactaccgtcaatctgaggttccagattctgtgtatcagcatttggttcaggatcgacataatgaaaatgactctggaagagaacttgtcattacagacccagttatcaagaaccgagagctcttcatttctgattacgttgacacttaccatgctgctgcccttagagggaagtgtaacatctcccatttttctgacatatttgctgctagagagtttaaagcccgagtggattcatttttctacatattaggatataaccctgagacaaggaggctgaacagtacccagggggagattcgtgtcggtcctagtcatcaggccaaacttccagatctgcaaccatttccttctccagatggtgatacagtgacccaacatgaggaactggtctggatgcctggagttaacgactgtgacctccttatgtacttgagggcagcaaggagcatggcggcatttgcaggaatgtgtgatggaggctctacagaggacggctgtgtcgcagcctctcgggatgacaccactctgaatgcactgaacacactgcatgaaagcggttacgatgctggcaaagccctgcagcgcctggtgaagaagcctgtgcccaagctcatcgagaagtgctggaccgaggacgaagtgaaacgcttcgttaagggactcaggcagtacgggaagaacttcttcagaattagaaaggagctgcttcccaataaggaaacaggggagctgatcaccttctattactattggaagaagacccccgaagcagccagctcccgagcccatcgtaggcaccgcaggcaggccgtgttcaggaggattaagactcgcaccgcgtccacacccgtcaacacaccctccagacccccgtccagtgaattcttggacctaagttcagccagtgaagatgacttcgacagtgaggacagtgagcaggagctgaaggggtacgcctgccgccactgcttcaccaccacctccaaagattggcaccacggaggccgggagaacatcctgctttgcaccgactgtcgcatccacttcaagaaatacggtgagctcccgcccattgagaagcccgtggacccgccaccgtttatgttcaaacccgtcaaggaagaggatgatgggctcagtgggaagcatagcatgaggacacggcggagtcggggctcgatgtcgacactacgcagtggtcggaagaagcagccagccagccctgatggtcgcacctcacccatcaatgaagacatccgctccagcggccggaactcccccagcgctgccagtacctccagcaatgacagtaaagcagagacagtgaagaagtcggccaagaaggtgaaggaggaagcctcttcccctcttaagagtaacaaacgccagcgggagaaggtggcctctgatacggaggaggctgacaggaccagctccaagaagacaaaaacgcaggagatcagcaggcccaactcgccatctgaaggtgagggagagagttcagacagtcgcagcgtcaacgatgagggtagcagtgaccccaaagacatcgaccaggacaatcgcagcacgtccccgagcatccccagcccccaggacaatgagagtgactcggactcgtcagcccagcagcagatgctgcaggcccagcccccagccttgcaggctcccactggggtcaccccagctccctcctcagctcctccagggacccctcagctgcccacgccagggcccacgccctctgccactgcagttcccccacagggctcccccacggcctcccaggcccctaaccagccacaggctcccacagcgcctgttccccacacccacatccaacaggcaccggccttgcacccccagcggccgccctcaccgcatcccccgccgcatccctcgccacatcccccgctgcagcctctgactgggtcggcgggccagccttctgcaccctctcatgcccagcccccactgcacggtcagggcccacccggccctcacagcctgcaggctgggcccctgctgcagcacccaggccccccacagccctttggcctccctccccaggcctcccaaggccaggcccctctggggacctccccagcagcagcgtaccctcacacctccctgcagctgccagcctctcagtcagcgctgcagtcccaacagcctccacgggagcagcccctgccaccagcgcccttggccatgccccacatcaagcccccgcctaccactcccatcccccagctgccggcgccacaggcccacaagcaccctccccacctctcggggccctcacccttctccatgaatgccaacctgcctccccctccagccctgaagcccctgagctccctgtccacacatcaccccccgtcggctcaccccccacccctgcaactcatgcctcagagccagccattgccctcctcgcccgcccagccccccgggctgacccagagccagaacctgcccccgccccctgcctcccacccccctacaggcctccaccaggtggccccccaacccccgtttgctcagcacccctttgtccctggaggccctcctcccatcacccctccgacctgcccctccacctctaccccaccggcgggacctggcacctcggcccagccaccctgctctggtgcggcggcttcaggaggcagcatagcgggggggtcgtcctgcccactccccaccgtccagatcaaggaggaggctctggacgacgctgaggagcctgagagcccccctcccccaccaaggagcccgtccccggagcccactgtggtggacacccccagtcacgccagccagtcagctaggttctacaaacacctggaccggggctacaactcgtgtgcccggacagacctgtacttcatgcctctggccgggtccaagctggccaagaagagggaggaggccattgagaaggccaagcgcgaggctgagcagaaagcccgagaggagcgagagcgggagaaggagaaggagaaggagcgggagcgggagcgagagcgggagcgcgaggcagagcgggcggctaaggcgtccagctcagcgcatgaaggtcgcctcagtgacccacagctcagtggtcctggccacatgcggccatccttcgagccaccaccaaccaccattgctgctgtgcccccctacatcgggcccgacacacctgcccttcggactctgagcgagtacgcccggccccacgtcatgtcgcccaccaaccgcaaccaccccttctacatgccccttaaccccacggaccccctgctggcctaccacatgcctggcctctacaacgtcgaccccaccatccgcgagcgggagctccgggagcgggagatccgagagcgggagatccgagagcgggagctgcgggagaggatgaagccgggcttcgaggtgaagcccccagagctggaccccctgcacccagccgccaaccccatggagcactttgcccggcacagcgccctcaccatccccccgaccgccgggccccacccttttgcttctttccacccgggcctgaaccccttggagagggagagactggccctggcgggcccccagctgcggcccgagatgagctaccctgacagactggcagccgagcgtatccacgcagagcgcatggcatcgctgaccagcgatcccctggcccgactgcagatgttcaacgtgactccgcaccatcaccagcactctcacattcactcccacctccacctccaccagcaggaccccctccaccaaggttcagcaggccccgttcacccgctggtcgaccccctgactgccggtccccacctggctcgcttcccctacccgcctggcactctccccaaccctctgcttggacagcccccacacgagcacgagatgcttcgccacccagttttcggcaccccctacccccgtgacctgcctggggccatcccaccccccatgtcagcagcccaccagctgcaggccatgcatgcccagtcggccgagctgcagagactggccatggagcagcagtggctgcatggacacccccacatgcatggtggccacctaccaagtcaggaagattattacagtcgactgaagaaagaaggtgacaagcagttataagttatttatttgttaacgctggctgtggaaaccccagttcttggggggagaaacaggactttttacataaaataggagctgcaaaagcaaaaagaatatcttctaaagatttctttatatatttaaaaacccacaactaaaaatgtatccacatagtagtgttcgtttgtcgagaggatttcctgagactggtttggatctccctgcatgacagtcccccagaaacttagtgagtcctggactggactgaacatccagaaagcttccctgcaatcttggggtttggctttagttttcttttccttgatttctcagtaggtgctagaatccagttcacacccttcactgtgcgtgcagacacactgacacactccgccacgagtgctccagagcccacgaggcttgcagatcgggggcataggaatttggaatccaagagctataatttttaaaaaaaaaaatcttttattttaatacattgtaggaaatcttcataattggagaaagttctgcagcatggctttttacgtctgtaaataaataattttagaacagcctttttttcttccataaactactattgtgatctattttttccagccatgtcactaattgtgaattcctaccaactattgacagaatacagagttgattttttaataaaaagttatatataattatccctttaattaaagggagcaaaggggcgttccacatggacagaggcttggaccgaggcctggtcacagcagcgagcatccagggtttgcagggacgatgttacagactctgttttctgcctggcgtttcacttgtgtctgctcctagcctgtgctctgccagcagcacagacatctgctccatcagacctcttccattttgcacagggagtgcaggaggtgaatgttcactttctgttctccagtgtcactgttctgtttccacgggatggaaagcgcatgggcctgtgtccattgtagatttccttctagatttctgtgtacacacacttgattgttctggatgaatgtcttttttaatactccgaaaatttcatcatctaagaaaatgattccatacaaataactcagcacacaagtgacccaggacatatgcctgccaaagggatgtgttagaaggctgccttctcatgcgcattgtcacttggatcttgtggtgaggacggccccatctttcttgccacagattgaggccacttttgagcaagggagatcctggagttaagacaggtgttgggggcagcctgtattttaccctaggggcaggtctgcatggtgaccccacattgcactggtaaaccatttgagtcccactcttcatcctggaagtgggaactggagtcccacccacagtgcattcagaaagcatgctgtgtgggggctgcttctcaggaggccaggcccttctgagcggaaccgtcctggagagagcctgccctcgtttccaggctgcagccgtaacgcactttctcccaggctgagggcgggtgttctggggtgtctgccctctgtcggccctgcttcctgccaggacgtggcctcttccgatccttttctctcagacactggaggtctcttctgccattgtgctggtcccatcccaagaattgtaggacagagaccacactgggtcggcggacacaaagtccatccaggacccaggccgcagagggagcaggaagagatgctgatagtttgatctagaaaccagcagctactggctcaaattcaggttctggcgtcaaatagcgacatttccagtttctcttaaaaaccgtgtttggtttcagttgggataggcttgttttgtctgttgaaaatgtttctagttttttttctttcatttttctctcattccatttctgccttaactttagtttgttcacagggaggcaaagctgacatgaaccttttgtcgtgggacttcaggccacattggcttgaaggcattcgtttccttctggggtggggacaggccctcatggcaggcttgttcccgtggctctgagcgaggcctcttcctgctgggctcccagactcctgcatccaggcccccaccttctcggcttctggtttttctttctttttggtagaacacaacatctaccattcagttaaaccttctttatctcctcctttggcatccatttttccaaagaagagtcgagtcctctgaggtctgtgcttgaaagccgtccgaaggcattcttgttagctttgcttttctccccatatcccaaggcgaagcgctgagattcttccatctaaaaaaccctcgacccgaaaccctcaccagataaactacagtttgtttaggaggccctgaccttcatggtgtctttgaagcccaaccactcggtttccttcggattttcctccctttgttcggggtttggtttggctcctctgtgtgtgtccgtatcttgttcggtgtcctcgaggttgagcttcactccactgcggcagaggcagcgtgcacactcggatttgctacgtttctatatatcttgaagctaaatgtatatatgagtagtttgccatgagataacacagtgtaaacagtagacacccagaaatcgtgacttctgtgttctctccatttgagtattttgtaatttttttgaaatatttgtggacataaataaaaccaagctacactacaaaaaaaaaaaaaaa

SEQ ID NO: 839 - DNA, 3663 bp, Homo sapiens
ggcggcggcggcggcgcggactgggtgcgcggcgcagcgtcctgtgttggaatgtgcggctgccgcgagctcgcggcgcagcagcggagcgagcgccgccgaggcccggggccccagaccctggcggcggctgcggcagccgagacggcagggcgaggcccggaggcctgagcaccctctgcagccccactcctgggccttcttggtccacgacggccccagcacccaactttaccaccctcccccacctctcccccgaaactccagcaacaaagaaaagtagtcggagaaggagcggcgactcagggtcgcccgcccctcctcaccgaggaaggccgaatacagttatggccacccaggtaatggggcagtcttctggaggaggagggctgtttaccagcagtggcaacattggaatggccctgcctaacgacatgtatgacttgcatgacctttccaaagctgaactggccgcacctcagcttattatgctggcaaatgtggccttaactggggaagtaaatggcagctgctgtgattacctggtcggtgaagaaagacagatggcagaactgatgccggttggggataacaacttttcagatagtgaagaaggagaaggacttgaagagtctgctgatataaaaggtgaacctcatggactggaaaacatggaactgagaagtttggaactcagcgtcgtagaacctcagcctgtatttgaggcatcaggtgctccagatatttacagttcaaataaagatcttccccctgaaacacctggagcggaggacaaaggcaagagctcgaagaccaaaccctttcgctgtaagccatgccaatatgaagcagaatctgaagaacagtttgtgcatcacatcagagttcacagtgctaagaaattttttgtggaagagagtgcagagaagcaggcaaaagccagggaatctggctcttccactgcagaagagggagatttctccaagggccccattcgctgtgaccgctgcggctacaatactaatcgatatgatcactatacagcacacctgaaacaccacaccagagctggggataatgagcgagtctacaagtgtatcatttgcacatacacaacagtgagcgagtatcactggaggaaacatttaagaaaccattttccaaggaaagtatacacatgtggaaaatgcaactatttttcagacagaaaaaacaattatgttcagcatgttagaactcatacaggagaacgcccatataaatgtgaactttgtccttactcaagttctcagaagactcatctaactagacatatgcgtactcattcaggtgagaagccatttaaatgtgatcagtgcagttatgtggcctctaatcaacatgaagtaacccgccatgcaagacaggttcacaatgggcctaaacctcttaattgcccacactgtgattacaaaacagcagatagaagcaacttcaaaaaacatgtagagctacatgtgaacccacggcagttcaattgccctgtatgtgactatgcagcttccaagaagtgtaatctacagtatcacttcaaatctaagcatcctacttgtcctaataaaacaatggatgtctcaaaagtgaaactaaagaaaaccaaaaaacgagaggctgacttgcctgataatattaccaatgaaaaaacagaaatagaacaaacaaaaataaaaggggatgtggctggaaagaaaaatgaaaagtccgtcaaagcagagaaaagagatgtctcaaaagagaaaaagccttctaataatgtgtcagtgatccaggtgactaccagaactcgaaaatcagtaacagaggtgaaagagatggatgtgcatacaggaagcaattcagaaaaattcagtaaaactaagaaaagcaaaaggaagctggaagttgacagccattctttacatggtcctgtgaatgatgaggaatcttcaacaaaaaagaaaaagaaggtagaaagcaaatccaaaaataatagtcaggaagtgccaaagggtgacagcaaagtggaggagaataaaaagcaaaatacttgcatgaaaaaaagtacaaagaagaaaactctgaaaaataaatcaagtaagaaaagcagtaagcctcctcagaaggaacctgttgagaagggatctgctcagatggaccctcctcagatggggcctgctcccacagaggcggttcagaaggggcccgttcaggtggagctgccacctcccatggagcatgctcagatggagggtgcccagatacggcctgctcctgacgagcctgttcagatggaggtggttcaggaggggcctgctcagaaggagctgctgcctcccgtggagcctgctcagatggtgggtgcccaaattgtacttgctcacatggagctgcctcctcccatggagactgctcagacggaggttgcccaaatggggcctgctcccatggaacctgctcagatggaggttgcccaggtagaatctgctcccatgcaggtggtccagaaggagcctgttcagatggagctgtctcctcccatggaggtggtccagaaggagcctgttcagatagagctgtctcctcccatggaggtggtccagaaggaacctgttaagatagagctgtctcctcccatagaggtggtccagaaggagcctgttcagatggagttgtctcctcccatgggggtggttcagaaggagcctgctcagagggagccacctcctcccagagagcctccccttcacatggagccaatttccaaaaagcctcctctccgaaaagataaaaaggaaaagtctaacatgcagagtgaaagggcacggaaggagcaagtccttattgaagttggcttagtgcctgttaaagatagctggcttctaaaggaaagtgtaagcacagaggatctctcaccaccatcaccaccactgccaaaggaaaatttaagagaagaggcatcaggagaccaaaaattactcaacacaggtgaaggaaataaagaagcccctcttcagaaagtaggagcagaagaggcagatgagagcctacctggtcttgctgctaatatcaacgaatctacccatatttcatcctctggacaaaacttgaatacgccagagggtgaaactttaaatggtaaacatcagactgacagtatagtttgtgaaatgaaaatggacactgatcagaacacaagagagaatctcactggtataaattcaacagttgaagaaccagtttcaccaatgcttcccccttcagcagtagaagaacgtgaagcagtgtccaaaactgcactggcatcacctcctgctacaatggcagcaaatgagtctcaggaaattgatgaagatgaaggcatccacagccatgaaggaagtgacctaagtgacaacatgtcagagggtagtgatgattctggattgcatggggctcggccagttccacaagaatctagcagaaaaaatgcaaaggaagccttggcagtcaaagcggctaagggagattttgtttgtatcttctgtgatcgttctttcagaaagggaaaagattacagcaaacacctcaatcgccatttggttaatgtgtactatcttgaagaagcagctcaagggcaggagtaatgaaactttgaacaaggtttca

SEQ ID NO: 840 - DNA, 2969 bp, Homo sapiens
gggtttacgctgccgccggcatccgctcggacgcggccacgttgtcttgcgcgctttgcccgcctggccctgggactctgaccctcggctaccctttcctgccccactagcgtggccgcgagcctcggtgagccggccgtattcccgctctcgcttagggggcacaggcgcaggcatcggcccggccactccaagccttcggtgcgcgggcgcgtctgggatacgggcccgggaggcgccgccctccgtccgcccggtgcctctcaggaacagcgaaccggagagagcgccggagagttgggctcagtgcagagctcggcgccggggcccatgcccgtgcgcccccgcaggccggcgccatggcctccgggagtgtggccgagtgcctgcagcaggagaccacctgccccgtgtgcctgcagtacttcgcagagcccatgatgctcgactgcggccataacatctgttgcgcgtgcctcgcccgctgctggggcacggcagagactaacgtgtcgtgcccgcagtgccgggagaccttcccgcagaggcacatgcggcccaaccggcacctggccaacgtgacccaactggtaaagcagctgcgcaccgagcggccgtcggggcccggcggcgagatgggcgtgtgcgagaagcaccgcgagcccctgaagctgtactgcgaggaggaccagatgcccatctgcgtggtgtgcgaccgctcccgcgagcaccgcggccacagcgtgctgccgctcgaggaggcggtggagggcttcaaggagcaaatccagaaccagctcgaccatttaaaaagagtgaaagatttaaagaagagacgtcgggcccagggggaacaggcacgagctgaactcttgagcctaacccagatggagagggagaagattgtttgggagtttgagcagctgtatcactccttaaaggagcatgagtatcgcctcctggcccgccttgaggagctagacttggccatctacaatagcatcaatggtgccatcacccagttctcttgcaacatctcccacctcagcagcctgatcgctcagctagaagagaagcagcagcagcccaccagggagctcctgcaggacattggggacacattgagcagggctgaaagaatcaggattcctgaaccttggatcacacctccagatttgcaagagaaaatccacatttttgcccaaaaatgtctattcttgacggagagtctaaagcagttcacagaaaaaatgcagtcagatatggagaaaatccaagaattaagagaggctcagttatactcagtggacgtgactctggacccagacacggcctaccccagcctgatcctctctgataatctgcggcaagtgcggtacagttacctccaacaggacctgcctgacaaccccgagaggttcaatctgtttccctgtgtcttgggctctccatgcttcatcgccgggagacattattgggaggtagaggtgggagataaagccaagtggaccataggtgtctgtgaagactcagtgtgcagaaaaggtggagtaacctcagccccccagaatggattctgggcagtgtctttgtggtatgggaaagaatattgggctcttacctccccaatgactgccctacccctgcggaccccgctccagcgggtggggattttcttggactatgatgctggtgaggtctccttctacaacgtgacagagaggtgtcacaccttcactttctctcatgctaccttttgtgggcctgtccggccctacttcagtctgagttactcgggagggaaaagtgcagctcctctgatcatctgccccatgagtgggatagatgggttttctggccatgttgggaatcatggtcattccatggagacctccccttgaggaggtgaattcaggccaaaagggctgttggctgtaatcctacgccaggcacaaggcatcttgttgccttgccacgtcctgtcacagctgggtatccttaccatgttccacgcccttgcagtgggagacaggatgtccatgttctctaccatccttttccttcccatgcagattgtgaaatgtaatgagatgtatcaagatatcctagaaataaaaaccagatgtccacctccagtgtttcatactttctggttttacacatcgctggagggataaagagtatggataatctttggatttggagagccgttcaagatacttccagcttcttggctcagcctggcttcctctggttcagccccacataatgattatggctatttgctgtcatttctgggctagggctcctttctaacaacctagactggaataaggccctgtcagcatggctccctttatcccagttttccgtctgggaacagtacctctgcccctgattcccaatgtgccatagttttattaactccattaaagaagcctgtatgtgttttggttagttacagttattttacaataatggtgggtaatggccccacctctgttatgagataatgttctaatcaatgtctctgcctttgtatcttttctgagggctttgtctgttctcttcattctaatgaaaggtgtattctagtgctgggtgcatatcatccaggataatattctgcccaactccatcctctgttactagatcccttaccagtcacatttgtggactggtggccagtcgtataccatccctggaaggattctgggacaatattccagggattcattgacttcttggctccttttctccatttcctttgggggaagggggaattgaccatgcttaagtgcatcctatcaaggggcagctccgtccccatggccattggatcatgagacactctgaagtcagaaggctggggcagatcacttcaagcaagcccccatgatggttctcagtcctgcttctctgtgggtacgtgcccctctgtttaaaaataaactgaatatggatgttta

SEQ ID NO: 841 - DNA, 6776 bp, Homo sapiens
gggagagggaagggggcggagctagccggagccgcgagtccattttggggctgtgcttggcgcgtaccgtgcggtccctgtagttggaggacgggcggtcgcgcggcctttcccactagccggagtagcctctagttcgttagtcaaaacgtgaaaaaaaagacctgctttgccctgggaaatagtaaccctgccaaatacatcagcttgtaggagacagaggatgtgatggagctgcttgaagaagatctcacatgccctatttgttgtagtctgtttgatgatccacgggttttgccttgctcccacaacttctgcaaaaaatgcttagaaggtatcttagaagggagtgtgcggaattccttgtggagaccagctccattcaagtgtcctacatgccgtaaggaaacttcagctactggaattaatagcctgcaggttaattactccctgaagggtattgtggaaaagtataacaagatcaagatctctcccaaaatgccagtatgcaaaggacacttggggcagcctctcaacattttctgcctgactgatatgcagctgatttgtgggatctgtgctactcgtggggagcacaccaaacatgtcttctgttctattgaagatgcctatgctcaggaaagggatgcctttgagtccctcttccagagctttgagacctggcgtcggggagatgctctttctcgcttggataccttggaaactagtaagaggaaatccctacagttactgactaaagattcagataaagtgaaggaattttttgagaagttacaacacacactggatcaaaagaagaatgaaattctgtctgactttgagaccatgaaacttgctgttatgcaagcatatgacccagagatcaacaaactcaacaccatcttgcaggagcaacggatggcctttaacattgctgaggctttcaaagatgtgtcagaacccattgtatttctgcaacagatgcaggagtttagagagaaaatcaaagtaatcaaggaaactcctttacctccctctaatttgcctgcaagccctttaatgaagaactttgataccagtcagtgggaagacataaaactagtcgatgtggataaactttctttgcctcaagacactggcacattcattagcaagattccctggagcttttataagttatttttgctaatccttctgcttggccttgtcattgtctttggtcctaccatgttcctagaatggtcattatttgatgacctggcaacttggaaaggctgtctttcaaacttcagttcctatctgactaaaacagccgatttcatagaacaatcagttttttactgggaacaggtgacagatgggtttttcattttcaatgaaagattcaagaattttactttggtggtactgaacaatgtggcagaatttgtgtgcaaatataaactattataaaatctgtttcaagtatgcagttttcttttgttagaaattgttagagaatagagagtggtaattcagatttggtcaacgattctagtcacatattttcctccaaaagtattccttccaaaaataatctatacatgttcaaattaggtagcataaagataaaagtgaaatttagtagtataggcctgaacctttttttgtttaaaagagtgcttttgaaataagcatccaccccaaatgttggttgtatttatgctgtgataaaaataggtgagagatcatatgatctaatattgtattgatggaagtataggtagtatagtagtgattgttcttcaagcatgcagtaaagatcacttttttttttttttttttttttgagatggagtcttgctctgtcgcccaggctggagtgcagtgatgcaatcttggctcactgcagcctctacctcccaggttcaagtgattatcctgccttagcctcctgagtagctgggattacaggcgcgtgccaccacgcccagctaattttttgtatttttagttgagacagggtttcactgtcccttaagaccatcctgttagccaagatggtcttgatctcctgacctcgtgatccgcctgcctcggcctcccaaagtgctgggattacaggtgtgagccaccgtgcccagccaaagactgctcttaaagcacctttttgacagtgaacatggtctaaaaaagggaagatattgtagaagatttcacacacacacgcgtgtgtgggagacaactaaaggtattgaaggtactaattaattagatttccaaaattttctacagagagttaattatcaccaaaatgtgaatggtacatacaaaacctggcattttcttgtgataagtttacatttttaggagagtggagctttcaatctgcccttttctcctttgtttttgtagttttcaccaaagatgatcaactagaaatgttaagtggctatgcaagcaaaagcatagataggttaaaaaaaaggatcagctggctgggcagggtggctcatgtctataatctcagcattctaggacagtgatgtgggaggattatttgaggctaggagttccagttcgaaaccagcttcgtaaacatagcaagacccagtctctaccaaaaaaaaaaaaaaaaaaaaaaaaaaaaaaaatatatatatatatatacacacacacacacacatatgtacacatacatatatatacatatatatgtatatatagaacacatggcaagagcaggaaatgggaagactaccttttttctggcagctatgtgttgttttgttcgaaagatggcaagtgtacaaccaaaccaatccacttgcttacagaaagaatgtttagtgtagttaagactaatttgacaacagataaaacagtctgtcagctattacaaagtaatcagctgaacactaatgctgttctgtctgctcacaagagataaagataccctctcatggaataaacaccttgcttagaattcatataacaaagaagtaaccttataactgctctctagtctgccttatttgtgtcatagagtaagatattccttgaaagcccattaagtggaatagactttctgaaaataagagttctttacctcagtcctcctctaatttggttgagaggaggtaatgaaaatggggacaggataaaaggtggcaactaaatttaaagcacagaagaaatgatttccttctagctatgagaatagtcaaattgagcttgccaggctgtctcattcctaacatgtaattcatgatttagccactaaatttctaaggagatcataagaaattaagaaaaacgtttaagtctagcctctgcgtggtagacaggtatggggagggagaatgcttttcccctcccagtaataaaaaaaaaaaaaaaaaaaatatatatatatatatatatatatatatatatatatatatatatatatatatatatagttttactaggttttcatggataagtttttaaatgtaagacaggaaagggatctatttgatgtctatcttcagatatattggcagttttccttaagctatttagttcctcatctgttgctttttcattttgtatactgcaagttcccaggcaactcgaatttgcaaacacagccatggatacactatttaccttacagtagtttcctgggaatctaagtctggtttttgttattcttccctcccctccactgcataatcatgtataactagcaacatttatggttataggttgatttcctaagtgtggctgatggtagcctctagtttgaagtgagggaagaatgagtagtcaggaactggtcactttgaatgtgggagggaagatattcacgacaaggttttctacgataaagcagtttcctgcttctcgtttggcacgcatgttagatggcagagaccaagaattcaagatggttggtggccagatttttgtagacagagatggtgatttgtttagtttcatcttagattttttgagaactcaccagcttttattacccactgaattttcagactatcttaggcttcagagagaggctcttttctatgaacttcgttctctagttgatctcttaaacccatacctgctacagccaagacctgctcttgtggaggtacatttcctaagccggaacactcaagcttttttcagggtgtttggctcttgcagcaaaacaattgagatgctaacagggaggattacagtgtttacagaacaaccttcagcgccgacctggaatggtaactttttccctcctcagatgaccttacttccactgcctccacaaagaccttcttaccatgacctggttttccagtgtggttctgacagcactactgataaccaaactggagtcaggtattttgtactttgcagtatttctcttgtataccagtttgtgatgttttctctaaaaacttgaagttcctcaggcctgtaacttctggaaaagatgattattcaaaataatgttttggggtaaccagtggagttgggtagaatgaccaaataattattttccaaactgggatactttttagagtgaaaggggctattattaggtgggacaaaaggaataaatgaagactgcccagaaaaaactgagactatggacattcaaatcatgggagaaaataattttgtagattatgttccattgctaatgaatttgacttagaaaagaattgccttatttttaagagattgtttcagtggttcacataaaggctcgctcactggtttctcttgagttccttacacactatataagttgttctttcagttttatgattcaactactgtttttccttcagctgactttatttttaaacacccttaaagacagatatatctcatggcaaatttggtatcctgttacagccttggctcttaaacaactcaaaatattgggataggctgtcagtatgttaaggatagttgctcctgagtcaattcttcacttactccctctgttgttcttggctggatcctaacgctgatttccactctgctgtcacaaacatttttccccccgtaaaatgtcttaatgctgtcctaccattattttaccaactgtgaaagctggctttaatttttaggaggaaaagaaaagcctgcatgtgttctttattggtatcatttaaaatatacttttttttttttttttggtaaaggtaggcgtattttaagatattttcttaacttgagcagtagccaacaggaaggataccagtgtctctctctcttagcgacacactccttggtcttgcttaccaactggaggacactaggtagaataaccgagtatgacaattcttaattgtttacattttataacttcctgtccttcaaaagagtttgaaatgtcattttgggaaaagagagccagtcaagctagtaggctgattgtgaagaaaatctaataccttatctttatctcaaacctctgtacaactttattttcattgatgggatactttaacaaaaatgaaattttttttggtttttaaaatatgagtgattatgacctctttggggatcatgcttcaaaaagtcagaaacctagagacaaaactgtcattgatttttaagaagaaacacactaggtcaaaagaagatgtcctggaaatatgaagtactctttaaaaaccatgcatttggagaaagtaattgtttccttgaaaaacatgattaaaaactaaaactgggatgttcctgtgtgtacacagtgccaaatggttttccctttttatgttgtgttttagaaacagcacgaaagttttttccattttaaagtgagaaaacattatatttagacttccataattccaaaatcagaagctatttttaaaattagcattttcttgcatcaccaaatggtattcaattgtttgaagctcaaaatttttaccattccataaatgtttgtgaatttttagacagtgccaatttaaaagtagagatagccaatctgaatacggtgaaattatggggatctctggtgattgggatgaaaactctggccttaaaaggtccacttttagtatataattgcctaattagcaatcatttttattttttgctcactccctggtctgaatctatctgtctattcagatattttttggtaggtttggaaaatggagaagtgagcctaattggtgcctaattgtctggtgtatcattcactttattcagtttgttctatcaatatgatttacccctcaaggttaacctagcaggttgctcagttattatctctcaaggtcacagtactagaaatacttggcttgcatctttcagatgccattcatgttatcaagctcaaattatagttggtcacaggattctaaagtctttatttgacttctcctttttgaactggctcaaatggaaaagtgtagttgcttttaaatgttaaaaataagtttaaactttatatttcccattggtttcccctattttgtcctttctttgtgtgcttgaaatattttatttttcagtttgtcctcatagggaatcaagtattttagctaggtgatgtcttgcaagtacgttccactttgttacaatctactatctgtatatactatttgtatcttaattcttttatgagatgttctgtaacatttttctcactttgacaaatgtttttagactgtacagtcaagatctggcgcttgggggtaagtggaatgatttgctaatattgagaatctgttgtatcaaacataataaactttttttgagatgtgaaaaaaaaaaaaaaaaaaaaa

SEQ ID NO: 842 - DNA, 1214 bp, Homo sapiens
cggcagcagcgagtggacatggctgcactcttccaagaagcaagcagctgtcccgtctgctcagactatctggaaaaaccaatgtccctggagtgtggatgcaccgtctgcctcaagtgcatcaattcgctgcagaaggagccccatggggaggatctgctttgctgttgctgttccatggtctctcagaggaacaaaatcaggcccaatcggcagctagagaggctggtttcccacatcaaggaactggagcccaagctgaagaagattctacagatgaacccaaggatgcggaagttccaagtggatatgaccttggatgccgacacagccaacaacttcctcctcatttctgacgacctcaggagcgtccgaagtgggctcatcacacagaatcggcaagaccttgccgagagatttgacgtgtccgtttgcatcctgggctcccctcgctttacctgtggccgccactactgggaggtggacgtgggaacaagcacagaatgggacctgggagtctgcagagaatctgttcactgcaaagggaagatccagctgaccacagagcttggattctggactgtgagtttgagggatggaagccgcctctctgccagcacggtgccgctgactttcctcttagtagaccgcaagttacagcgagtggggatttttctggatatgggcatgcagaacgtttccttttttgatgctgaaagtggttcccatgtctatacattcaggagcgtctctgctgaggagccactgcgcccatttttggctccttcaattccacctaatggtgatcaaggtgtcttgagcatctgtcctttgatgaactcaggcactactgatgctccagtccgtcctggggaggccaaataagccgccactgcaaaaaaaaacagggtcagaaaattacttgggtgggtagacttaggaattttctacttggtaaaagcattatacagtcataggagaaagatatgggacatttctataatctatattctaatttgattcgattattgagtcgtaagtattaattattgccaccatccaactcattgagtcttatggttcacatcttgtttcctatagaaatgttctgtattctcggatcaatttccaaatgctttactttttcatttctgtaagttcaaatcaatgtttaaattatagaagttatgaggtaaataaacatttggatatca

SEQ ID NO: 843 - DNA, 4392 bp, Homo sapiens
acagttgccccggtgagggaaacggaggcgccatagccacggtagtcgtggcgaccaagcaacccggcaacgcgagtcaacaacaacaaccgcccggccgacccccacccccaccccccaggcccggcccggggaccccagcacgtcccgtccccttcccaacatcgactccgagacctccgaaaagcgtttccgcagacagaagtggggagaagcggaggaattaaaaaaaaaaaaaagccttatttattatcattttccccaccgttggcatggcaacacaggcgtatactgagctacaggcagccccgccaccatcccagccgccacaggccccgccacaagcccagccccagccgccaccgccaccacccccagcggcaccccagcccccgcagccacccaccgctgctgccacccctcagccccaatatgtcaccgagctgcagagcccccagccccaggcacagccaccgggtggccagaagcagtacgtgacggagctcccggctgtacccgcaccctcgcagccaaccggtgcacccaccccttcgcctgcaccccagcagtacatcgtggtcactgtctctgaaggtgccatgcgggccagcgagacagtgtcggaggccagccccggctccaccgccagccagaccggcgttcctactcaggtggttcagcaggtgcagggcacccagcagcggctgctggtccagacgagcgtgcaggccaagccaggccacgtgtcgcccctccagctgaccaacatccaagtgccccagcaggctcttcccacgcagcgtctggtggtgcagagcgcagccccaggcagcaaaggtggccaggtctccctgacggtccatggtacccagcaggtgcactcgcccccagagcagtcgccggtgcaggccaacagctcttccagcaagacagccggggcccccacgggcacagtgccacagcagctgcaggtccacggcgtccagcagagtgtccccgtcacccaagagagatctgtggtccaggccactccacaagcgcccaaacccggcccggtgcagccgctgaccgtgcagggcctccagccagtccacgtggctcaagaggtgcagcagctccagcaggtgcccgtcccacacgtgtactccagccaggtgcagtatgtggagggcggcgatgccagctacacggccagtgccatccgttccagcacctactcctatcccgagacgccgctgtacacgcagacggcaagcaccagctactacgaggccgcaggcacggccacccaggtcagcacccccgccacctcccaggcggtggccagcagtggctccatgcccatgtacgtgtccggcagccaggtcgtcgccagctccaccagcactggggctggggccagcaacagcagcggaggtggtggcagtggtggtggcggcggcggcgggggaggcggtggcgggggtggcagtggcagcaccggaggcggcggcagcggagcaggcacctacgtgatccaaggcggctacatgctgggcagtgccagccagtcttactctcacaccacccgtgcctcgccagccacggtccagtggctcctggacaactatgagacggctgagggcgtgagtctgccacggagcaccctctactgccactacttactgcactgccaggagcagaagctggagcccgtcaacgccgcctccttcggcaagctcatccgctccgtcttcatgggcctgcgaacccgccgtctgggcaccaggggcaactccaagtaccactactatggcctgcgcatcaaggccagctcacccctgctgcggctgatggaggaccagcagcacatggccatgcggggccagcccttctcgcagaagcagaggctcaagcccatccagaagatggaaggcatgaccaacggcgtggcggtggggcagcagccgagcacggggctgtcggacatcagcgcccaggtgcagcagtaccagcaatttttggatgcctctcggagcctccctgacttcacagagctcgacctccagggcaaggtgctgcctgagggcgtcgggcccggggacatcaaagccttccaggtcctgtaccgggaacactgtgaggccattgtcgacgtcatggtgaacctgcagttcaccctggtggagacgctgtggaagaccttctggaggtacaacctcagccagcccagtgaggcgccaccgctggctgtacatgacgaggccgagaagcgactgcccaaagccatcctggtgctcctctccaagttcgagcccgtgctccaatggaccaagcactgtgacaacgtgctgtaccagggcctggtggaaatcctcattcccgacgtgctgcggcccatccccagtgccttgacccaagcgatccggaactttgccaagagcctggagagctggctcacccacgccatggtcaacatccccgaggagatgctgcgggtgaaggtggccgcggctggcgccttcgcgcagacactgcggcgctacacgtcgctcaaccacctggcgcaggcggcgcgcgctgtgctgcagaacaccgcacagatcaaccagatgctgagcgacctcaaccgcgtggacttcgccaacgtgcaggagcaggcctcgtgggtgtgccgctgcgaggaccgcgtggtgcagcggctggagcaggacttcaaggtgacgctgcagcagcagaactcgctggagcagtgggcggcctggctggacggcgtggtgagccaggtgctcaagccctaccagggcagcgccggcttccccaaggccgccaagctcttcctcctcaagtggtccttctacagctccatggtgatccgggacctgaccctgcgcagcgccgccagcttcggttccttccacctcatccggctgctctacgacgagtacatgtactacctgatcgagcaccgcgtagcccaggccaagggcgagacccccatcgccgtcatgggcgagttcgccaatctggccacctccctgaaccccctggaccccgacaaagacgaggaggaagaagaggaggaggagagcgaggacgagctgccgcaggacatctcactggcggctggcggcgagtcacccgcgctgggcccggagaccctggagccgccggccaagctggcgcggactgacgcgcgcggcctcttcgtgcaggcgctgccctccagctaagcccttggcctccccgccccacccgcccccgccacccctccacgccagggtccctcaaagcttctgtggcttcgtggtcactgctccagcctcagccagggcagggagggggactccgagacagggaagaccggggccctcctcccttatggggccggcacaatcagtgggctgggcggagccgcagctgcaaactctgacacaaaagacgtgccttaaggaacccgccgcgtgcccaggtgccccgcggggcatccagctcggccccttggccgcccccctcccaggccccagcgtcttctccccagccccgtcctcccaccaccccagggggcaggcaggcaggccccctcccgtgcgaaactgttaacttattcagctcgctggctttgcacagcctgtcctgggcccagccctgagccccgggccggcgcaggtgggcgtcacctggggactccccactgtcagcagcagccccgggacaccctacccccagcaaccccactgcttccccttcttggtattaagtgcaattaaagccgtgggtgtcgcatcttctccagcgctgggccctcccttgcccccaagctcaagaagggggcactgcccggcccggctgtgaggagggcggcagggggcacggcctccagcttccaaagagcagcgagccgcggagccggggagtgcccacagaccccagcccccgcgcccccgccctccgccgctggtttgtaatggaaccttttctgtgcccctatcttcccggagaccacgcttctcctccgtgccgtgcgacccccaccccatgactattgtgcgattcgtgagcgccgcccgagcggagttggtaacttgttgggtttttttccaaccatcatggccttatctgttccagttttctcagtgttttcagcctgtgagatagatgtttatggcaagaaaaaggaaaaaaaaatggaaatctgacctattgtataaaaatcactattttgtgtgctccgcgtgctatagcttttggggcggccctgcccagtccccgtgcccacggggctccctctcccggtggtgaaagtgtccacacgtgtggtagtctagtgtgccgagctgttttctacctttttgtagtctttcttaaaacaataaattccgctgtgatatttgcctaaaaaaaaaaaaaaaa

SEQ ID NO: 844 - DNA, 4114 bp, Homo sapiens
gcgagcgtgggcgggccgttaggaaggtggggcgcggagcctggtaaccgttgccggtaacaacgccccgccccgtcgggcgggcgggctgcgcgaggctggctggcggcgggagccggaggaggagcggccgccgccgccaccgccgccgccatagagactgtagccgtggagactgttacttaccaacggggaccaacacgcagcagccgctgccgccgccgcgggagccgctgcccgaactcccggcccgaactccagacctgagcatgcagaattccgagggtggagcggattcgccagcgtccgtggctctgcgtccctcggcggcagccccgcctgtgccagcctccccgcagagggtgttggtccaggcagccagctccaatcccaaaggggcccagatgcagccgatctccctccccagagttcagcaggtaccccagcaggtgcagccggtgcagcacgtgtatcctgcccaggtgcagtacgtggaagggggagacgccgtctacaccaatggagccatacgaacagcctacacctacaaccccgagcctcagatgtacgcccccagcagcacggcttcttacttcgaggccccaggcggtgcccaggtgaccgtggcagcctcgtccccgccagcggtcccctcccacagcatggtgggcatcaccatggatgtcggggggagccccatcgtctccagcgcgggagcctatctcatccacggggggatggacagcaccagacactccctggcccacacctcccgctcatcgcccgccacgcttgaaatggcgattgaaaacctccaaaaaagcgaaggaatcacatcacacaaaagcggtttactcaacagccatctccagtggctgttggataattatgaaacagcggaaggtgtgagtctccccagaagttctctttacaaccactaccttcggcactgccaggagcacaagctagacccagtgaacgccgcctccttcgggaaactgatccgttctgtgtttatggggctgagaacgcggcggctgggcaccaggggcaactcgaagtaccattactatgggattcgtctgaagccggactcaccactgaaccggctgcaggaggacacgcagtacatggccatgcggcagcagcccatgcaccagaagcccaggtaccggccagcccagaagacggacagcctcggggacagcggctcccacagcggcctgcacagcactccggaacagaccatggccgtgcagagccagcaccaccagcagtacatagatgtctcccacgtcttccccgagttcccagcgcccgacctgggcagcttcctgctgcaggacggcgtcacactgcacgacgtcaaggccctgcagctggtgtacagacggcactgcgaggcaactgtagatgtggtgatgaacctccagttccactacatcgagaagctgtggctctccttctggaactctaaggcctcctccagcgacggccccacctctcttcctgccagtgacgaagaccccgagggcgccgtcctgcccaaggacaagcttatctccctgtgtcagtgcgaccccatcctcaggtggatgaggagctgcgaccacatcctctaccaggcgctggtggagattctcatccccgacgtgctgaggccggtccccagtaccttgacacaggccatccgtaactttgccaagagcttggaaggctggttgacaaatgccatgagtgacttcccacaacaggtcatccagaccaaggtgggcgtcgtcagtgccttcgcccagacgctgcggcgctacacgtccctcaaccacctggcgcaggcggcccgggcggtgctgcagaacacgtcccagatcaaccagatgctcagcgacctcaaccgcgtggactttgccaacgtgcaggagcaggcctcgtgggtgtgccagtgcgaggagagtgtggtgcagcggctggagcaggatttcaagctgaccctgcagcagcagagctccctggaccagtgggccagctggctggacagtgtggtcacccaggtcctgaagcagcatgccggcagccccagcttccccaaggccgcccggcagttcttgctgaaatggtccttttacagctccatggtgatccgggacctgaccctgcgcagcgctgccagcttcggctccttccacctcatccgcctgctctacgacgagtacatgttctacctggtggagcaccgcgtcgcggaggccaccggagagacgccgatcgctgtgatgggagagttcaacgatctcgcctctctgtcgctgacgctgctcgacaaagatgacatgggcgatgagcagcgtggcagcgaggcgggcccagacgcccgcagcctgggtgagcccctggtaaagcgggagcgcagtgaccccaaccactccctgcagggcatctagcagccccggccggcgcctcctcgaggttccaaaagatgccgcctggtcactctgggaacctggatttcaccggctccaccaaattagtgcctcttagatgatgtgatgtttactttgactcaagcgggggctcccggggtcagtgttcaagaaggaaagcagttgttgaagctacagaagcccaggccagggctcccactggctgtagctgtgctctgggtccccaggtccctgcgcagccaccagggccccaccagaccatgggttccttattctggacaaaccctcctctgctggaaccctggactttggccccagtccctttaagagctgaaagggctgtgctgagagcactggcctctgcactcaactggaaccaattttcaccatgattttaaaaattaaaaaaacctggcagagcccgactagaaagggacggcctctcccctcctacctgccaccgctggggaggcacagagctcgccagcgtccctggagtcccctcaggaatggaaagtggagtgcccttgtctggtagcaccatgtgggagggacccagctgggcgcagcgccctgtggccttttagatccagacctccctgccggatgccccgaggcgggaggccggctgtgctgcaggaacccatctccagatgccaaaggacttgaggggcagctgacaatcgctgtgtcccggcagatccgcagctcgaaaaagaacaagccacagaaacgggctcgctcgtgccaggacacagcagtgtctttcaaaaaatcaaaaccagaagttttatcagcagcaggaaggatgtgggactctgtccaagttcaccgtcaccatcaagccactggctgtggaaggagtttgtccaacagggtcagtgtcacagccacaacttcagaaagcagccatcccgcgtgtcgtccaaacagcagtgcctgcgtcccgctccacggagtcttccagaacacctccctctgaactaatcccggagcaccccacccccagcgagtcccacctggacctcttcaaagtcaaaactcttctctcgggacaaacaaatattcgggactttcgaagccctgaacttgagacaccaagtttgtctccatggaaacacgtagccgctgcagttggacagctgcgtgctggagttctgtccccaaaccaactgcagagaagaaagacgagcctcggcccaggacgcgatttctaacgaaatgcaatagttttctctttttggaaaaatgtttataccaatagttttgtgcgctaattgttattagaacgtttcttatgaatgtgtacattgcagtatattcagtcccaaatgttttgttctcattcacacagaaggtactaatgtcagctcacgtggcctttaaaaacctacttccccgcccgcaggagctcagagcatcgctgggcctgcgccagagtgaggggtgcaggaagacaaagacgcgtgctcactttagaaacgaaaagctgggaataatcacactgtttgtctggtcgtatagcccaaaccttagttgaaatcagacagaaagaatgtctttaaaatatacatctcctctccttggagacactgaagctcacagttaacggattgtaatgcccggcttttcctcactcctggtaaccaatacaagctggtttctgccttaaa

SEQ ID NO: 845 - DNA, 3275 bp, Homo sapiens
cgtgcgagtgtctccctctccctctcgctctctctctctctccctctctctctctcttttgtgagttatagcaaccgttgccttgtgaatcaagcgccatagtcaccgtagtcctggcgactgttacccatcaacaacaactactcctctcctcctcctcctcctcttcctcctcctcctccccaccaccaccatctccatcacccaccaacaacaccacaataatccacagccaaggccacttggtcattctggcattttatggtagagaatacgttgagtttggctctggaaggaatatgagagaccatcatgcagacatcagagactgggtcggacacaggctcgacagtgaccttacaaacatctgtggctagtcaagcagcagtgcctacgcaggtggtacagcaagtaccagtacaacaacaggtacagcaggtacagactgtgcagcaggtacaacatgtctatcccgctcaggtgcagtatgtggaaggaagcgatactgtctataccaatggagcaatccgaacaacaacgtatccttacacagagacacagatgtacagccaaaatactggagggaattactttgatactcaagggagttccgcccaggtgactaccgtggtctcatcccacagtatggtgggcactggtgggattcagatgggcgtcacaggaggacaactcatcagcagctctggaggaacctatctgatcggcaactcaatggagaattctggtcactcagtgacacacacaactcgggcctccccagcgacaattgaaatggcgattgagacgctgcaaaagtctgacggtctgtccactcacagaagctctcttctcaacagccatctccagtggctgttggacaattatgagacagcagaaggagtgagccttcccagaagcactctgtacaaccactaccttcgacactgtcaggaacacaaactggacccagtcaatgctgcctcttttggaaaattaataagatcaatttttatggggctacgaaccaggagattgggcactagaggaaactccaaataccactactatgggattcgtgtcaagccagattcccctcttaatcgtctgcaagaagacatgcagtatatggctatgagacaacaacccatgcaacagaaacaaaggtacaagcctatgcagaaagtggatggggttgcagatggtttcacaggaagtggtcaacagacaggcacatctgttgagcaaactgtaattgcccaaagccaacatcatcaacagtttttagatgcatctcgagcacttccagagtttggagaagttgaaatctcttctctgccagatggtactacctttgaggatatcaagtcactgcagagtctttatagagagcactgtgaggcaatattggacgttgttgtgaatcttcaatttagcctgatagaaaaattgtggcaaacattctggcgctattctccctctactccaactgatggcactaccattaccgaatcgagcaatctgagtgaaatagaaagtcgacttccgaaagcaaagctgataactctgtgcaaacatgagtctatcctgaaatggatgtgtaactgtgaccatgggatgtaccaggctttggtggagattctcatccccgacgtccttagacctattcctagtgccttgacccaagccattcgaaattttgcaaaaagccttgaaggttggctttccaatgccatgaacaatattccacagagaatgatacaaaccaaggttgccgctgtaagtgcctttgcccagactctgcgaagatacacgtcgcttaatcacctggcccaggcagctcgtgcagtgcttcagaacacttcccaaatcaaccagatgcttagtgacctcaaccgtgtcgactttgccaatgtccaggagcaggcttcctgggtgtgccagtgtgatgacaacatggttcagagactagaaacagacttcaagatgactcttcagcagcagagcaccctggagcagtgggctgcgtggcttgacaatgtgatgatgcaagcactgaaaccctatgaaggaagacccagttttcctaaagccgccaggcagtttctgctaaaatggtctttctacagctcaatggttattcgggacttaaccttacgcagtgctgctagctttggctccttccacctgatccgtctactctacgacgaatatatgttttacttagtagaacatcgtgttgctcaggcaacaggagagactcctatagcagtcatgggcgaggtaagagaggctgaaagagctgtgacccactgggttattaaaaataagccagaattacacttcagtctaaatacattattgattaaaaccatggttcctaaccaagtcagcctcagagccaggagggactgtggagttattgcaagagttccttaaattcctctgttcttatgtgcttaatcaaaagattctaaaattgtggattatatcatgtgaaagttcatggaatgtgtctctatattatacaggtacctatgtaaaagaaaaacttgagaaccactggaatatgaaaaatattttaagtgggaaaaagattggtgctcctgataaagcaaagggctgggaatacaatggaaaggattaaatatgtattttgtagactctttcccggtctccaagaacaaagtaaatgattctattttagaaggataaaaatggtaatgatgataactaacattttttggacacttactatgtgcgaggcacagttctatgttttttacatgtaataaagcacttaatgcaagtctttgagatacgttctactttattctgttttacaataagcatccgaggtttatgcagaaagctaaggcacagaaaggttaaatgattactcagctaaaaaatggtagagatttttttttcaaacacagtctgattttcaaacccatatgcttctaaccactaatgatgtaagggggaaaattctcttcttcagaatttctgaatagtcatcaaaatggcttatcaaaaagcttaaactctgaatataacaagggctggttaatataatgaggaatagatgcaaatgctcagatggttcagcactggcttattttgttatattgaatgcaggaggcgggggtagtttataccttgtcgaatcataccagattattaaatgtgacaaattacccaaggcggtaaaaaagacatgttcacttttaagctatgtgtatgtgcttatataaataaaaaagagtgaaaacaga

SEQ ID NO: 846 - DNA, 2188 bp, Homo sapiens
tggagaggccacagctgctggcttcctgggcttctccaaactcctgtgtgtcgccactgccaccggcagggagccaggagagagacagaaaggggctgagacagaatgatcaaaaggagagcccaccctggtgcgggaggcgacaggaccaggcctcgacggcgccgttccactgagagctggattgaaagatgtctcaacgaaagtgaaaacaaacgttattccagccacacatctctggggaatgtttctaatgatgaaaatgaggaaaaagaaaataatagagcatccaagccccactccactcctgctactctgcaatggctggaggagaactatgagattgcagagggggtctgcatccctcgcagtgccctctatatgcattacctggatttctgcgagaagaatgatacccaacctgtcaatgctgccagctttggaaagatcataaggcagcagtttcctcagttaaccaccagaagactcgggacccgaggacagtcaaagtaccattactatggcattgcagtgaaagaaagctcccaatattatgatgtgatgtattccaagaaaggagctgcctgggtgagtgagacgggcaagaaagaagtgagcaaacagacagtggcatattcaccccggtccaaactcggaacactgctgccagaatttcccaatgtcaaagatctaaatctgccagccagcctgcctgaggagaaggtttctacctttattatgatgtacagaacacactgtcagagaatactggacactgtaataagagccaactttgatgaggttcaaagtttccttctgcacttttggcaaggaatgccgccccacatgctgcctgtgctgggctcctccacggtggtgaacattgtcggcgtgtgtgactccatcctctacaaagctatctccggggtgctgatgcccactgtgctgcaggcattacctgacagcttaactcaggtgattcgaaagtttgccaagcaactggatgagtggctaaaagtggctctccacgacctcccagaaaacttgcgaaacatcaagttcgaattgtcgagaaggttctcccaaattctgagacggcaaacatcactaaatcatctctgccaggcatctcgaacagtgatccacagtgcagacatcacgttccaaatgctggaagactggaggaacgtggacctgaacagcatcaccaagcaaaccctttacaccatggaagactctcgcgatgagcaccggaaactcatcacccaattatatcaggagtttgaccatctcttggaggagcagtctcccatcgagtcctacattgagtggctggataccatggttgaccgctgtgttgtgaaggtggctgccaagagacaagggtccttgaagaaagtggcccagcagttcctcttgatgtggtcctgtttcggcacaagggtgatccgggacatgaccttgcacagcgcccccagcttcgggtcttttcacctaattcacttaatgtttgatgactacgtgctctacctgttagaatctctgcactgtcaggagcgggccaatgagctcatgcgagccatgaagggagaaggaagcactgcagaagtccgagaagagatcatcttgacagaggctgccgcaccaaccccttcaccagtgccatcgttttctccagcaaaatctgccacatctgtggaagtgccacctccctcttcccctgttagcaatccttcccctgagtacactggcctcagcactacaggtaatggaaagtccttcaaaaactttgggtagttaatgtttgaagaaagggctttctgccagcctgggcaacatagtgagacttcatttccacacacacaaaaagccagacatcttggctcacacctgtagtcccagctacttgggaggctgaggtgggagaattgcttgagcccaggagctacgatcgcaccactgcattctagccttagtgatacagtgagaccttgtctcaaaaaaagaaaaacagggctttctggaaaaacattcttctcccacaatctccaaaagataatgccaaaacctgggtatcttcctggatttgtgaatgacgtacaggtattcatttattcattggtacacattctgtatgctgctgttttcaagttggcaaattaagcatatgataaaatcccaaaactaa

SEQ ID NO: 847 - DNA, 3618 bp, Homo sapiens
attcagaaaaaggaaaataaagcaacgcacgagccggctgggccaggaccttggggctgggctggagtgaaggtggctacgagttttccagatttaggagacttcagaaaggtggggcagatagaatggagatggcaaagatctctttgggcatatatgggcctggcgaagtaatggaataatttctaattttcggagaaggcaagtgccctcatgccgggatggcagaagatgagcctgatgctaagagccccaagactgggggaagggcccccccaggtggtgctgaggctggggaacctaccacccttcttcagaggctccgaggtaccatttccaaggccgtgcagaacaaagtagaggggatcctgcaagatgtacagaaattttctgacaatgacaagctgtatctctaccttcagctcccctcaggacccaccactggagacaaaagctcagagccaagtacactgagcaatgaggagtacatgtatgcctataggtggatccgcaaccacctggaagagcacactgacacctgtctgccaaagcaaagtgtttatgatgcctatcggaagtactgtgagagtcttgcctgttgccgcccactcagcacagccaactttggcaagatcatcagagagatcttccctgacatcaaagctcgaaggcttggtggccggggccagtccaaatattgctacagtggcataaggaggaagaccttggtgtctatgccacccctgcctggacttgacctaaagggttctgagagtccagaaatgggcccagaagtaaccccagcacctcgagatgaactggtggaggcagcgtgtgccctgacctgtgactgggcagagcggatcctgaaacggtccttcagttccatcgttgaggtcgcccgcttcctgctacagcagcatctcatctctgcccgatctgcacatgcccatgtgcttaaggccatggggcttgctgaagaggacgaacatgcacctcgggaacggtcatctaaaccaaagaatggtttagagaacccagagggtggagcccacaagaagccagagagactggcccagcctcctaaggatctggaagcccgaactggggccggtcctctcgcacgtggagagcggaagaagagtgtagttgagagctcggccccaggagccaataacctgcaggttaatgccctagtggctcggctgcctctgctccttccccgggcccctcgctcactaattccgccaatcccagtctctccacctattctggcccccaggctttcttcaggtgccctgaaagtggctacactgcctctgtctagtagggccggggcacccccagcagctgtgcccatcattaacatgatcttaccaactgttcctgctttgcctggacctggacctgggcctgggcgagctccacctgggggactcactcagccccggggcacagagaacagagaggtaggcataggtggtgaccaaggaccacatgacaagggtgtcaagaggacagctgaagtacctgtgagtgaggccagtgggcaggctccaccagctaaagcagcaaagcaggatatagaggatacagcaagtgatgccaaaaggaaacgggggcgccctcgaaaaaagtcaggtggaagtggggaaaggaattctacccctctcaagtcagcagctgccatggaatctgcccagtcctcaaggttaccatgggagacatggggctcaggaggggaaggcaactcagctggaggggcagagaggccagggccaatgggagaggctgaaaagggggcagtacttgcccagggtcagggagatggtactgtttccaaaggaggaaggggccccggttcccagcataccaaagaagcagaagataaaattcccttggtcccctcaaaagtgagtgtcatcaagggcagcagaagccaaaaggaggcttttcctttggcaaagggagaggtagacactgcaccacagggtaataaagacttaaaggagcatgtgcttcaaagttccttatcccaggagcataaagacccaaaagcaacacccccatgatacaggtctgtggggaagagtgtttatatccctacgttaactttgcctagtagaggcccttctttgcacttgcttctcatttggctattcttttcctaaggaagtccattctcctctgtacagacagctgagtcacccagtctacttagtacctggttgctgcctctgaccttttcagcttgataccctgggctttagtgtaaccaataaatctgtagtgaccttacctgtattccctgtgctatcctgtgggaaggtaggaatgggctaagtatgatgaatatataggttagggatcttttggttttaaatcacagaaaacctaattcaaactggcttaaaataaaaaggatttattggttcatgtaactagaaagtccataggtagtgctggctccaggtgaagacttgacccagtagttcagtatgtctctaaataccggactgacttttttctcactgttgcatcttctgtaggaccatttaagtctgggccacttaatggctgccagcattcctaagattacacttttccccatttatgtccaatcagaaaaagaaggcatctttgtaccagaaatctcagcaaaagccctaatattcacactgattaggcctgggtcacatgtccaccctgaccaatcactgtggccaggaggatgatacatgctaatttgcttattctatatcatggacaacacctttggggaaaagggtgggggtcagcctccccaaaatcacatggattccccaagtggaaactaggagcagggagttgcttgggtggccgctaacaccaggctactcttattttagcttgctaagttgagatcagctagacctgctttcttttctcctcagtcttgcatttccctcaatacaagctgtagcctctttcctcgtttctagtctcagaaggaaggagagggaagccattctcctctagggactcttcagtctcatttagatgatagtccctttttttctacctccatattagagatggagctccttccttttcctgtttcttaatttttgtcttctcattcctgcttccctctcaccctattgccagttccaccaactagagtgaaagacttcctagccatttcattaaatctattctgtatccaccaggtggcagcatcttgtcatacgtgtcaggacttaggactgcggggtttaggttagatgtcacggaaaaagctagttctgtggtcaggcggcaccaatgagaaaggaatgcagaccctccagatgtatccttgggaaaagcagtaaaccaactaatatttattgaagacctactttgtcctctacatagggtagcttctgtcagggaatcttggttcttcccaagaaacactgattttctttcagggagacttcatgtgttcatttatttccaccacagcagattttaagaaattataatatgtaatatttgatatctataaagagtatatctaacgtgaataaattatgaagcatactaatgagtacctatgacccataacacatatacattaaaacattttaaatacca

SEQ ID NO: 848 - DNA, 1438 bp, Homo sapiens
ccggacgccgcacggctcctgttccggtgtcagagggcccgccctccccgctcctcagtctttgcggacaagaaaggggctgtgtgagacgcagggaaggaggcacacccgggggtggcgcagtgaggagggggcgcgacggccaggaggctggtggagcgacacccaggcaggagagggggaagaactctctccctttctgaacccccttttccttgagagacgagttgggggagtcctccacgcattacccactcgggccgcaaaaactcccttctttagccctctgcccccgcccttgcttataagcctttgagaccgcagaagggaccttgttgtggaacgggacggccaagaggaagccagatcgctgagggtccggtctccagtttgcctcctgctatatccattggaagagaaaagtttgtgacttgggcccccaagttttgagagaactgggctttcggcgcggggggacagaggaggctcgtggggagctttccccatggagcttacccagcctgcagaagacctcatccagacccagcagacccctgcctcagaacttggggaccctgaagaccccggagaggaggctgcagatggctcagacactgtggtcctcagtctctttccctgcacccctgagcctgtgaatcctgaaccggatgccagtgtttcctctccacaggcaggcagctccctgaagcactccaccactctcaccaaccggcagcgagggaacgaggtgtcagctctgccggccaccctagactccctgtccatccaccagctcgcagcacagggggagctggaccagctgaaggagcatttgcggaaaggtgacaacctcgtcaacaagccagacgagcgcggcttcacccccctcatctgggcctccgcctttggagagattgagaccgttcgcttcctgctggagtggggtgccgacccccacatcctggcaaaagagcgagagagcgccctgtcgctggccagcacaggcggctacacagacattgtggggctgctgctggagcgtgacgtggacatcaacatctatgattggaatggagggacgccactgctgtacgctgtgcgcgggaaccacgtgaaatgcgttgaggccttgctggcccgaggcgctgacctcaccaccgaagccgactctggctacaccccgatggaccttgccgtggccctgggataccggaaagtgcaacaggtgatcgagaaccacatcctcaagctcttccagagcaacctggtgcccgctgaccctgagtgaaggccgcctgccggggactcagacactcagggaacaaaatggtcagccagagctggggaaacccagaactgacttcaaaggcagcttctggacaggtggtgggaggggacccttcccaagaggaaccaataaaccttctgtgcagaatga

SEQ ID NO: 849 - DNA, 1126 bp, Homo sapiens
gtggcgagggcggtgcctgggggcaggggcctcctcggagggcggcggggacagacccgtcgccccggctccgcagccccgccccggccccgcctccgctccggccgccgaaggctataagatctaggaacccgagccggtggtagggcgggcgcggaccgtgctgggagcggcgcggctggagcgcagcgccgaagggactggcagggctgaagtgtgcgggacagcaagcccccgaatagccccggctgccacctcgcaggacccaaggccacgcgcgccgggcccagctgagccgcctcatgaagccgcccgcggcgcagggcagccccgcggccgccgcggccgcagccccggccctggactcggcggccgcggaggacctgtcggacgcgctgtgcgagtttgacgcggtgctggccgacttcgcgtcgcccttccacgagcgccacttccactacgaggagcacctggagcgcatgaagcggcgcagcagcgccagtgtcagcgacagcagcggcttcagcgactcggagagtgcagattcactttataggaacagcttcagcttcagtgatgaaaaactgaattctccaacagactctaccccagctcttctctctgccactgtcactcctcagaaagctaaattaggagacacaaaagagctagaagccttcattgctgatcttgacaaaactttagcaagtatgtgaaacaagaagttctgggtcctttcatcataagggagaagcttcagaaagttccgaggacctgctaaaatcagctactagaatctgctgccagaggggacaaagacgtgcactcaaccttctaccaggccactctcaggctcaccttaaaatcagcccttgatcccatttctgggcaatttagacagtgaaactgactttgtttacctgcttgcagcatattagaacagacgatccatgctaatattgtattttctcttaaaacatagctttcctgtaatttaaagtgcttttatgaaaatatttgtaattaattatatatagttggaaatagcagtaagctttcccattataatatatttttgtatacaaataaaatttgaactgaagtctgcaaaaaaaaaaaaaaaaaa

SEQ ID NO: 850 - DNA, 3869 bp, Homo sapiens
agaagggagcgagagccccagagcgcggcggcagcggcggcctggcccttccagagggccagagccagggacatgcgggcgcccgggactccgcgttccgcgcggcccggcgcctgagcgcctccgttccccgtcccggagctgccggcggcatgatccgacacgccggggcgcccgcgcgcggggaccccacgggtccggttccagttgttggcaaaggagaggaagaggaagaggaagatggcatgcggctttgtctgccagccaacccgaaaaactgccttcctcaccgccggggcatcagcatcctggagaagctcatcaaaacatgcccggtgtggctgcagctgagtctgggccaggcagaggtggccaggatcctgcaccgggtggtggctgggatgttcctggttcgccgggacagcagctcgaagcagctggtgctctgtgtccactttccttctctgaacgaaagctcggccgaggtgctcgaatacaccattaaggaagaaaagtcgatattgtacctggaaggctcggctcttgtgtttgaggacatcttcagattgattgcgttctactgtgtcagtagagacttactgcccttcacactgcggctaccccaggccatccttgaggccagcagcttcacggaccttgagaccatcgccaacctgggtctgggtttctgggactcctcgctgaatcctccacaagaaagagggaagccagcagagcccccaagagaccgggcccccggattccccctagtctccagcctcaggcccacagcccatgacgcaaactgtgcctgtgaaatcgagctgtcggtaggaaatgaccgcctgtggtttgtgaatcctattttcatcgaggactgcagcagcgccctgcccaccgaccagccacctcttggaaattgccctgcacgccctttgccgcccacctctgatgccacctcacccacctccaggtgggccccacgccgcccaccaccccctcccccagtgctgcccctgcagccctgcagcccagcccagccccctgtgctccctgctcttgcccccgcccctgcctgtcctttgcccacctctcccccagtgcctgccccccacgtcacaccccatgccccaggtcccccagaccatccgaaccagccgcccatgatgacctgcgagagactcccatgccccactgcaggcctgggccccctcagggaggaagcgatgaagccaggggcagcctccagtcccttgcagcaggtccccgccccgccactgcctgcgaagaagaaccttcccactgcccctcccagacgccgcgtttccgagagggtgtccttagaagaccaaagtccggggatggcggcagagggggaccagctcagcctgcctccccaagggacctcagacggccctgaggacacgccccgggagagcacggagcaaggccaggacacagaggtgaaagccagcgatcctcacagcatgccagagctgcccaggacagccaaacaacccccagtcccgccccccaggaaaaaacggatctctcgacaactggcctcgaccctcccagctcccttagagaacgctgagctctgcacacaggcgatggccttggagacacccacgccgggtccacccagagagggccaaagccctgcttctcaggctgggactcagcaccctcctgcccaggccactgcccattcccagagctctccagagttcaagggctccctggcctccctctcagacagcttgggggtgtctgtcatggccaccgaccaggactcctactccaccagcagcacggaggaggagctggagcagttcagcagccccagcgtgaagaagaagccctccatgatcctgggcaaggctcggcaccggctgagctttgccagtttcagcagcatgttccacgctttcctctccaacaaccgcaagctgtacaagaaggtggtggagctggcgcaggacaagggctcgtactttggcagcctggtgcaggactacaaggtgtacagcctggagatgatggcgcgccagacctccagcacggagatgctgcaggagattcgcaccatgatgacccagctcaagagctacctgctgcagagcaccgagctcaaggccctggtggaccccgccctgcactccgaggaggagctcgaagcaattgtagagtctgccttgtacaaatgtgtcctgaagcccctgaaggaagccatcaactcatgcctgcatcagatccacagcaaggatggttcgctgcagcagctcaaggagaaccagttagtgatcctggccaccaccaccactgacctaggtgtgaccaccagcgtgccggaggtgcccatgatggagaagatcctgcagaagttcaccagcatgcacaaggcctactcacctgagaagaagatctccatcctgctcaagacctgcaaactcatctacgactccatggccctcggcaacccagggaagccctatggggcggatgacttcctgcctgtgctcatgtatgtgctggcccgcagcaacctcacggagatgcttctcaatgtggagtacatgatggagctcatggaccccgccctgcagctgggggagggttcctactatctgaccaccacctacggggccctggagcacatcaagagctacgacaagatcacggtgacccggcagctgagtgtggaggtgcaggactccatccaccgctgggagcgccggcgtactctcaacaaggcccgggcctcccgctcctccgtacaggacttcatctgcgtgtcgtacctggagcccgagcagcaggcgcggacgctggcgtcgcgggcggacacccaggcccaggcgctgtgcgcgcagtgcgcggagaagttcgcggtggagcggccgcaggcgcaccggctgttcgtgctggtggacgggcgctgcttccagctggcggacgacgcgctgccgcactgcatcaagggctacctgctgcgcagcgagcccaagcgcgacttccactttgtctaccggcccctggacggtggtggcggcggcggcggcgggagcccgccctgcctggtggtgcgggagcccaacttcctgtgaggccctcccggggcgcctcccctcacccccaggcgcacgtctggccccgcctctggctgcgcactcccgaccgcgacgtccacgcagcagagggacatgggccattccatgacgtgcccaggccaacgtcgcaggacagttgtgaaaataacatgacgctcgtccaaggccacttcctgagggcaagtcctaatagccctgagacaccgagacggcatgttcttcattagacggaaagggaaactgaggctcaggagagaggcgctccaggccgctgcagccaacaaaccggcgccctcttcacacgtagctcctcaggccattccccatgagtcccccacacccaccccatcctcggtctttgcaaagaagggcccgagcttagtttccccaggactggcctaggaaggagcaccggccacagctgctccccgtgccactcagggtggacccagcatctcaggagcacctcagggtgtcggttaagagacaggcctccacccctgcaccagagcctgctcttagctcccggtgcccccagaccccgcagctctgtgcccggcaagaagcagctagacacacgccagggcgccaagcacggccagctccgcggacccatggacaagcccagccccgcctcagggaaaacagggcctttccctacaggacacgccccagagctgtggcagattgcaggagccatcgtgtggggagaatttaataaaagcccttttgaaaaaaaaaaaaaaaaaaaaaaaa

SEQ ID NO: 851 - DNA, 1744 bp, Homo sapiens
cagcgcccgggccatggcggcggcggtggcgggagctgctgtctgagcagcggttgcggaccgagcgaacttggcccaggagcccgggcctagggagaggcgcggcggcggcgggagcgcgaacggctggagctggccttcttcgccttctcctcggctgtggagccctggtggggggtctgcgcccggtcaccatgacgacgccggcgaatgcccagaatgccagcaaaacgtgggaactgagtctgtatgagctgcaccggaccccgcaggaagccataatggatggcacagagattgctgtttcccctcggtcactgcattcagaactcatgtgccctatctgcctggacatgctgaagaatacgatgaccaccaaggagtgcctccacagattctgctctgactgcattgtcacagccctacggagcgggaacaaggagtgtcctacctgccgaaagaagctggtgtccaagcgatccctacggccagaccccaactttgatgccctgatctctaagatctatcctagccgggaggaatacgaggcccatcaagaccgagtgcttatccgcctgagccgcctgcacaaccagcaggcattgagctccagcattgaggaggggctacgcatgcaggccatgcacagggcccagcgtgtgaggcggccgataccagggtcagatcagaccacaacgatgagtgggggggaaggagagcccggggagggagaaggggatggagaagatgtgagctcagactccgcccctgactctgccccaggccctgctcccaagcgaccccgtggagggggcgcaggggggagcagtgtagggacagggggaggcggcactggtggggtgggtgggggtgccggttcggaagactctggtgaccggggagggactctgggagggggaacgctgggccccccaagccctcctggggcccccagccccccagagccaggtggagaaattgagctcgtgttccggccccaccccctgctcgtggagaagggagaatactgccagacgaggtatgtgaagacaactgggaatgccacagtggaccacctctccaagtacttggccctgcgcattgccctcgagcggaggcaacagcaggaagcaggggagccaggagggcctggagggggcgcctctgacaccggaggacctgatgggtgtggcggggagggtgggggtgccggaggaggtgacggtcctgaggagcctgctttgcccagcctggagggcgtcagtgaaaagcagtacaccatctacatcgcacctggaggcggggcgttcacgacgttgaatggctcgctgaccctggagctggtgaatgagaaattctggaaggtgtcccggccactggagctgtgctatgctcccaccaaggatccaaagtgaccccaccaggggacagccagaggaaggggaccatggggtatccctgtgtcctggtctatcaccccagcttctttgtcccccagtacccccagcccagccagccaataagaggacacaaatgaggacacgtggcttttatacaaagtatctatatgagattcttctatattgtacagagtggggcaaaacacgcccccatctgctgccttttctattgccctgcaacgtcccatctatacgaggtgttggagaaggtgaagaaccctcccattcacgcccgcctaccaacaacaaacgtgcttttttcctctttgaaacctgcaaaaaaa

SEQ ID NO: 852 - DNA, 3310 bp, Homo sapiens
cccggcggggggaggttggggacgggcctggcagttgtgaactcgaacctgccgctgtcgccgcggcggggcggggagcgagagtgggccgcggaggccggccttcgggctccatggacgggcgccgcgtccctgcacagcccgccgcagaggtaaggctggcctctctgcagtcagaggtctgagctctgccatggggataggggtgtctttattactgcagttttctctaacacctgggggctaccggagtgtgggccgaagcaggcgctgcagccgcggaagtatccccaggaacatccccaagaggagctggaaaaagcctcatccccagctctgcagtctccaggggagctcagtgtctgtttgtccagcttctcagagttgctgtgcagctcggatgtggcataggaaacagcagacacagggagagggcagcataaggcactgtagggagcagtggccacattttctgcagaggaagaaccgatgctggaacgtcgttgcaggggccccctggccatgggcctggcccagccccgactcctttctgggccctcccaggagtcaccccagaccctggggaaggagtcccgcgggctgaggcaacaaggcacgtcagtggcccagtctggtgcccaagccccaggcagggcccatcgctgtgcccactgtcgaaggcacttccctggctgggtggctctgtggcttcacacccgccggtgccaggcccggctgcccttgccctgccctgagtgtggccgtcgctttcgccatgcccccttcttagcactgcaccgccaggtccatgctgctgccaccccagacctgggctttgcctgccacctctgtgggcagagcttccgaggctgggtggccctggttctgcatctgcgggcccattcagctgcaaagcggcccatcgcttgtcccaaatgcgagagacgcttctggcgacgaaagcagcttcgagctcatctgcggcggtgccaccctcccgccccggaggcccggcccttcatatgcggcaactgtggccggagctttgcccagtgggaccagctagttgcccacaagcgggtgcacgtagctgaggccctggaggaggccgcagccaaggctctggggccccggcccaggggccgccccgcggtgaccgccccccggcccggtggagatgccgtcgaccgccccttccagtgtgcctgttgtggcaagcgcttccggcacaagcccaacttgatcgctcaccgccgcgtgcacacgggcgagcggccccaccagtgccccgagtgcgggaagcgctttaccaataagccctatctgacttcgcaccggcgcatccacaccggcgagaagccctacccgtgcaaagagtgcggccgccgcttccggcacaaacccaacctgctgtctcacagcaagattcacaagcgatccgaggggtcggcccaggccgcccccggcccggggagcccccagctgccagccggcccccaggagtccgcggccgagcccaccccggcggtacctctgaaaccggcccaggagccgccgccaggggccccgccagagcacccgcaggacccgatcgaagcccccccctccctctacagctgcgacgactgcggcaggagcttccggctggagcgcttcctgcgggcccaccagcggcagcacaccggggagcggcccttcacctgcgccgagtgcgggaagaacttcggcaagaagacgcacctggtggcgcactcgcgcgtgcactccggcgagcggcccttcgcctgcgaggagtgcggccgccgcttctcccagggcagccatctggcggcgcatcggcgcgaccacgcccccgatcggcccttcgtgtgtcccgactgcggcaaggccttccgccacaaaccctacctggcggcgcaccggcgcatccacaccggcgagaagccctacgtctgccccgactgcggcaaagccttcagccagaagtccaacctggtgtcgcaccggcgcatccacacgggcgagcggccctacgcctgtcccgactgcgaccgcagcttcagccagaagtccaacctcatcacccaccgcaagagccacatccgggacggcgccttctgctgtgccatctgtggccagaccttcgacgacgaggagagactcctggcccaccagaagaagcacgatgtctgagacggtgggcggggccgtgttggctgagagagggctggggtccttcgtggtgggagtcgcagtgggctgggggtgcctgcctagtgctggagtaggggacaatgggaatcctagaggggatggaagacgcggggagtgagctgggtgggccctgctagcgagagaggtcaaccccggtggccagggaacccacttccaagcgcagggacgccggcctccagctggtgtgtgctaaggctccgtcctgactgccctgtgccctggaaaagcagcaatagcatccgccccttagagccctctggctagaggagccaccagtggaaaggaagaccctccatcctctggtattaacgccttaatgcccctgtcttttactgtaagttacttaagatcatttttggaagcaggcgtggtagagtcctgtaaatgaatgctctgggctagatacagcttggagaacctgctggccttgttagacagcacttgggcctttgccagcagcaagaggtgaagcgaagccactcttacctctcccttcccctcccacctgccccctgcgtaggcacccagacttggagagacccgtctgctgttaatacttccatcctcttccttcccaaagagcagatcccaaggcatttactccttggtctgtctcgctttatctgtcgcccctcccagcgctgagagcctcccctggctgtcagcagcactgtgtccaggctcttgtctgaacaccgcagcccctccttcgctccttccagagctcagcatgtcacggcaaggactgccgcattggtgatggagggccagctgaggggaagttgctggtgagtttccttttctccatttctagcatatggacacctggcctctgcttgagcacttaggtgacaggaacttccgcacctcctgaggccctggatgattctaattgttagaaattctaattgttagaaatccttccttataatgaatgaattctgctttcctataatttctacctattgggccttgttctgttctctggaactaaacagaacaaccatttacccctccttttcaaactagagaataaagatttggttttagaactggtaaaaaaaaaaaaaaaaaa

SEQ ID NO: 853 - DNA, 4282 bp, Homo sapiens
cattttggtcaacaccctgcttactgcgcacggccaatcctatgagaactcagcatcccagctcatctgagcagatcctggaagtgatttctgcagctcaggattttttttttaagctacattgaaaatataggtttattttttgttcaggtttttcttttatattttttttctgcacaaaggaggaggatttttcacttactcatatcgaggccagatttttaaagccagctaaggcagcatcagctgtgcgggatttaaagcctatagctcagctgaaaaaaaaggtggggggcagggaagggaagataaaaggagaggaagctgggagaagacaagcatcatcttattttgctatgtggtaggaactgtctataagatagtgtagaattgtttatcttgagcagtttgttcttaacctataaggtatttttccttttttttttttttaaacctcccccacccttttcctgaaagctttgtttcagagctttgtattgggtttttttggtgaggaggttgtatttatttttttggtgtgtgtgtgtgagtgtgtgtgtgtctgtgtgtgtgttgtggtcccagctgagtcatcatgtctgctctgacgcctccgaccgatatgccaacccccaccactgacaagatcacacaggctgccatggagaccatctacctttgcaaattccgagtgtccatggatggagaatggctctgcctgcgagagctggatgacatctcacttacacctgacccagagcctacccatgaagatcctaattatctcatggctaatgaacgcatgaacctcatgaacatggccaagctgagtatcaagggcttgattgaatcagctctgaacctggggaggactcttgactctgactatgcacctctccagcaattctttgtggtgatggagcactgtctgaaacatggcttgaaagctaaaaaaacttttctcggacaaaataaatccttctgggggcctctagaactggtagaaaagcttgttccagaagccgcagagataacagcaagtgttaaagatcttccaggacttaagacaccagtaggtagaggaagagcctggcttcgtttggcattaatgcaaaagaaactttcagaatatatgaaagctttgatcaataagaaagaacttctcagtgaattctacgaacccaatgccctcatgatggaagaagaaggagccataattgctggtctgttggtgggtctgaatgtcattgatgccaatttctgtatgaaaggagaagacttggactctcaggttggagttatagatttttcaatgtatctcaaggacgggaacagcagtaaaggtactgaaggagacggtcagattactgcaattctggaccagaagaactatgtagaagaactgaacagacatttgaatgctactgtaaacaaccttcaggcaaaagtagatgcattagaaaaatccaacactaaactgacagaggagcttgcagttgcaaacaacaggatcattaccttacaagaagaaatggaacgagttaaagaggaaagttcctacatactggaatccaatcggaagggtcccaagcaagacagaactgcagaagggcaagcactaagtgaagcaagaaagcatttaaaagaagagacacaattacgattggatgttgagaaagaactggagatgcagatcagcatgaggcaggagatggaattggctatgaagatgctggagaaggatgtctgtgagaagcaggatgccctggtatctcttcggcagcagctggatgacctcagagctctcaagcatgaacttgcctttaagctgcagagttcagacttaggagtaaaacagaaaagtgaactaaacagtcgcttggaagagaagactaatcagatggctgctaccattaaacaacttgaacaaagtgaaaaggatttggtgaaacaggcaaagaccttaaatagtgcagcaaataaactgatcccaaaacatcattaggcatttttaagttggtcacgtcgcaagtccgatatcacaacttaattgtaaaaggaagaaatctgaaagttactacatttaagctctgattctatataaaatgtcaccaaaaagttgactttgaatttgttggacttttaaaaaaccagttggaaatataggttgggtttttttcttattgttttctccccagggttagaaaaattggtataagttcctaattaaaagctgaataaactttgagaaattatttctgagttgaccaataaataaaaataccactttctttaaaaaagcctagggaattgaagctctgtacatatactaatgatgcctttacaacccagtccttgataataccagattctcggtgcattgttcatgtctgtatctgcaagcctgttctgccattgcagtgtgatgaacctagaggtaactaccatgtgaacttgaactcttctaaaatagttctgtgtctcttagaccatgaccccttttcacttttgttatataggtttaatccccaagccaaggatagtacttagtatttcactacacttctattctcagtaaccaagattgcttgcaactttttttgccttggtgacttttgaaaaaaaaagaaaagaaaaagcagcatccttatatttctttaaaatacatagaaataaagttagtaattaggtaacctatgataacataataatgtggacgcctggggaaaccctcctcatgtttgtcatcttctacctctgccgttttcctgcaattccgcttcctacttaggcagttcagagagaacaattctaataaaaacactcctctcctattaacaaaaaatgatgcagtacccatttttcgtatcctgcttttcttatattggagtaaaaaggacagggtatagacatgaatgatgatattctgcctggcctgtcatttcttacctggaaacatttacttaagagtttctgttactttttgttcagatggggatttgctaaaggttctgggaagctaataattgaattattagaaaaacatttcagaataggaagtaaatgataaacttatattctttattattatttagtacaaaaatagattcccagtagatatccacaagcaatattagcagggcttctgtttctaagtgaccacagactaaccctttctaggctttaacattgtaaataatcctataaacagtttgattttttaagatgatttttgatttgaagagacaggctttacataagccttcattccttcaaaaggtcctgacaaaatacttgggtttttttctctttttttcattctggtatgctttgcagcatttcagctgctttggtggggacacagataaccccttcgcttccagctcttaaaattctttatctttttcttggcaaaaccagaattaagagtgtaagatagattccatgtgtgcttatataggtccctgcacagattggacttgaaccaaaattaagtccaaagaacatatgtttagaccaacttcatggaagtggaagatcctgtgctcttgaacttattttaattcttataatttgcacctatataaacaaagctcctactgtattcttctcttcatcaaccttttgtggtgatgggttgccttttctacgagcatttggaaggagtgatcaaataccgaaattgaactttctaaaacctacacatagcatgcgtttaaattctattatataaagccccaagtgctttaccttctaaaacatgcttctctataggtgcaaagttataagatatgtagaagaaaacatccatcagaatcttctggagaatatggtcagagtcttaaacaggcccagtgctgagttctttgtccacttagtcacacatcttttgtgggaatgggaaaggaaggagacagccaaactctgacaaaggcttttccttatagaataacccaaagcctaggtgagggttgatatataatgtcccatgatttaatatatgtggtttgggggaaaggacaagaaaaaactataattccacatataagaaggtagttgcccatttacaagttccagttatgtgtgtaaaacagaaaaattaagtaccaaacctattaggaaatttttttaaaaagtggatttaacttaaattactgtgtacttgaggttggctttggatatggattttctaaaaagtgatgttttattgtttatcatctaatggctgtaaactgtagtactagaataaaaaaaatggaaaatcaaaaaaaaaaaaaaaaaa

SEQ ID NO: 854 - DNA, 6266 bp, Homo sapiens
ggttgcctacgcgctggtgggccgtgggaagatggcggacggaaagggagacgccgccgctgtcgccggggctggggctgaggctccggcggtagcgggagccggagatggagtcgagactgagtccatggttcggggtcatcgccccgtatctccagcgccgggagcctcgggactgcggccgtgtctgtggcagctggagacagagctgagggagcaagaggtgtcggaggtctcatctttgaactactgccggagcttctgccagaccttattgcaatatgcaagcaacaagaatgcatcagaacatattgtgtatcttctggaggtatatcgacttgccatccaaagctttgccagtgcacgtccatacttaactactgaatgtgaagatgtcctcttagtgcttggcagattagtactgagttgtttcgaattactgctttcagtgtctgaaagtgaactgccatgtgaagtctggctaccattccttcagtctctacaggagtcacatgatgcattattggaatttgggaataataacctacaaatattggttcatgttaccaaggaaggggtgtggaaaaacccagttcttcttaaaattctgtctcaacagccagtagaaacggaggaagtcaataaattgattgcacaagaaggaccttcctttctgcaaatgcgaataaaacatttgttgaaatctaactgcatcccccaggctactgctttatcaaaactatgtgcagaatctaaagaaatttcaaatgtgtcatcttttcagcaagcctatatcacatgtttatgttctatgctccctaatgaagatgctattaaggagattgcaaaggtcgactgcaaggaagtactagacatcatttgtaatctggaatctgaggggcaggataacacagcatttgttctttgtacgacttaccttacccagcagctccaaactgcaagtgtatattgttcttgggaactgactcttttttggagtaaactgcaaagaagaattgacccttctttagatacttttttggagcgctgtcgtcagtttggtgtcatagctaaaacgcagcagcatttattttgcctcattagagttatacaaactgaagcacaagatgctggtcttggggtgtcaattttactgtgtgtcagagctcttcaactcagatcaagtgaagatgaggaaatgaaggcatcagtttgtaaaacaattgcctgtcttttaccagaagatttagaagttagacgagcctgtcagcttacagaattcttaattgaacccagtttggatggatttaatatgttagaagaactatatttgcaaccagatcaaaaatttgatgaagaaaatgcaccggttccaaattctcttcgatgtgagctcttactagctttaaaagcccactggccttttgatcctgagttttgggactggaaaactttaaaacgacactgccaccaacttttaggacaagaagcctcagattctgatgatgatttaagtggctatgaaatgtccattaatgacacagatgttttagagtcatttctcagtgactatgatgagggtaaagaagataaacaatatagaagaagagatttgacagatcagcataaggagaaaagagacaaaaaacctattggctcttctgaaagatatcagaggtggcttcagtacaagtttttctgtttgttatgtaagcgggaatgtatagaggctagaattcttcatcattctaagatgcatatggaagatggaatttacacctgtccagtttgtattaaaaaatttaagagaaaagaaatgtttgttcctcatgtgatggagcatgttaaaatgccaccaagcagaagggaccgctctaaaaagaaattactgttaaaaggctctcaaaagggtatttgtcctaagagcccctctgcaatcccagagcaaaaccattcattgaatgaccaagccaaaggagagtctcatgaatatgtcacattcagcaaattagaagattgccacctgcaagacagagatttgtatccatgtcccggtacagactgttcccgtgtgtttaagcaatttaaatacttaagtgtgcatcttaaagctgaacaccaaaataatgatgaaaatgccaagcactacttggatatgaaaaatagaagagagaagtgtacttactgtcgacgacattttatgtctgcttttcaccttcgagagcacgaacaagtgcattgtgggcctcagccttatatgtgtgtatctatagattgctatgctaggtttggatcagtaaatgaactacttaaccataaacaaaagcatgacgatctgcgttacaaatgtgaattaaatggctgtaatattgttttcagtgacttgggacagctttaccaccatgaagcacaacactttagggatgcatcttacacatgcaacttccttggctgtaaaaagttctattactccaaaattgaataccagaatcacctctcaatgcataatgttgaaaattcaaatggagacataaagaaatcagtgaaacttgaggagtctgcaacaggtgaaaagcaagattgtattaatcagccccatctacttaaccaaactgataaatcacatttacctgaagatcttttctgtgcagaatcagctaattctcaaatagatacagaaactgcagaaaacctgaaagaaaacagtgacagtaattctagtgatcagttaagtcatagctcttcagcttcaatgaatgaagagctaattgacacactagatcactctgaaactatgcaggatgtattgttatctaatgagaaagtctttgggccctccagtttaaaagaaaaatgttccagtatggcagtttgttttgacgggactaagtttacctgtggttttgatggctgtggttccacatacaaaaatgcaagaggaatgcagaaacatttacggaaggttcatccataccatttcaagcccaaaaagataaagacgaaagatctgtttccctctttgggtaatgaacataatcagacaactgaaaagttggatgcagaacctaaaccctgctcagatacaaacagtgactccccagatgaaggtctagatcacaatattcacattaaatgtaaacgagaacatcaaggttattcctcagaatcctccatttgtgcttctaaaaggccctgtacagaggataccatgttggaacttctgttacgcttgaaacatttaagcttgaaaaactcaataacacatggatctttctcagggtcattgcaggggtacccatccagtggtgctaagtctcttcagtcagtttcatctatctcagaccttaattttcagaatcaagatgaaaacatgccaagtcagtaccttgcacagttggcggctaagccgtttttctgtgagcttcaaggatgcaaatatgaatttgtgaccagagaggctctgttaatgcattatcttaaaaagcataattattcaaaagaaaaagtccttcagttaaccatgttccaacatcggtattccccatttcagtgtcatatttgccaaaggtcatttacaagaaaaacacaccttaggattcattataaaaataaacatcaaattggcagtgacagagcaactcacaaactattagataatgaaaagtgtgatcatgaaggcccatgttcagtagataggttgaaaggtgattgttctgcagaacttggaggtgatcccagtagtaactctgagaaaccacactgtcatcctaaaaaggatgaatgtagttctgaaacagatttggaatcatcttgtgaagaaacagaaagtaaaacatctgacatttcatcaccaataggcagccatagagaagaacaagaaggaagagagggcagaggtagcaggcgaactgttgctaaaggaaatctgtgttatattttgaataaataccacaaaccattccattgtattcataaaacttgcaactcctcattcaccaatctaaaaggcttaattcgccattacagaactgtacatcagtacaacaaagaacagttatgtttggagaaagacaaagcaagaaccaaaagggaacttgtcaaatgtaaaaagatatttgcttgcaaatataaggaatgtaataaacgcttcctgtgttccaaagctcttgctaagcactgtagtgattctcataacctagaccatattgaagagcctaaagtactttccgaagctggatctgcagcaaggttttcttgtaaccagcctcagtgccctgctgttttttatacattcaacaagttgaagcaccacttgatggaacagcataatattgaaggggaaatacattcagattatgaaattcattgtgatcttaatggctgtggccagattttcacccatcgcagtaattactcacaacatgtatattaccgacataaagactattatgatgatttgtttagaagccagaaagtagcaaatgagagactactaaggagtgaaaaggtatgtcaaacagctgatactcaggggcatgaacatcagaccaccaggagatcatttaatgctaagtctaaaaaatgtggcttaatcaaagaaaagaaagccccaataagttttaaaaccagagctgaggccctccatatgtgtgtggagcactctgagcacacacagtacccctgcatggttcaaggatgcttatctgtggtgaagttggagagcagcattgtgaggcattacaaacgcactcatcagatgagtagtgcctatttagagcaacagatggagaatcttgttgtttgcgttaagtacggtaccaaaattaaggaggaacccccttctgaagcagatccctgtataaagaaagaagaaaatagaagctgtgaatcagagcgcacagaacacagccattccccgggtgacagtagtgcacccatccagaacactgattgctgtcattcaagtgaaagggatggaggtcagaaagggtgcatagaaagcagctcagtatttgatgcagatactctgctctacaggggaactttgaaatgtaatcatagttccaaaaccacttccctagaacagtgtaatatagttcagcctcctcctccttgtaaaatagaaaattccatacctaatcccaatgggactgaaagtgggacttatttcacaagtttccagctgcctttaccaaggatcaaagaatcagaaactaggcagcatagttcagggcaagaaaacactgtaaaaaatccaacccatgtcccaaaagagaattttaggaaacattcacagccccggtcatttgatttgaagacttacaaacctatgggatttgaatcttcatttctgaaatttattcaggaaagtgaagagaaagaagatgattttgatgattgggagccttcagagcacttaacattaagtaattcttcacagtccagtaatgatttaacagggaatgttgtggcaaataatatggtgaatgacagtgaacctgaagttgacatacctcattcttccagtgactctacaattcatgagaacctgactgcaatcccacctttaatagtagctgaaacaacaacagttccttccttggaaaacctgagggttgtattggacaaagcattaacagactgtggagagcttgccttaaaacagcttcattatcttcggccagtggtggttcttgaaagatctaagttttccacaccaattttagacttatttccaacaaaaaagacagatgagctttgtgtaggaagttcataagtagcaattttgttttagtaacagactggctccaacactgcaacatggggacatttgccaactcgaacaaaggctgagaagcagccacaccgttgtttagggtagaataggctgtgtatttacatgaatgtataatatctatgtcagcagtattggctgagtccattagctctccagttggtttaatgattgggtttatttttgtttgtttgtttattaaaaaaatggaactgtacacttgtttggtgctaattaatacatcaaaatatactggggcttcctttttcaaattaagtgtgcatgattgtatatggaacaaatactaaggtcccagggtgggagggctagggaaagggatatggagttcttacttgacttgaatgtgcacctgagggtgctttgtgtaatatattgtacactacagcatcttatattttttgagttgagtttcaataaattacaatttttcacccaaaaaaaaaaaaaaaaa

SEQ ID NO: 855 - DNA, 3864 bp, Homo sapiens
atacagtccatccgggttctttgagatgctgtttggcgactcgtcgccattcccggagcaggtcggcctcggcccaggggcgagtatccgttgctgtgtcggagacactagtccccgacaccgagacagccagccctctcccctgcctcgcggcgggagagcgtgtccggccggccggccggcggggctcgcgcaacctccctcgcctccccttcccccgcagcctccgccccgccaggcccggcccggactcccgagccccggcctcctcgtcctcggtcgccgctgccgccgggcttaacagccccgtccgccgcttctcttcctagtttgagaagccaaggaaggaaacagggaaaaatgtcgccatgaaggccgagaaccgctgccgccgccgacccccgccggccctgaacgccatgagcctgggtccccgccgcgcccgctccgctccgactgccgtcgccgccgaggcccccgttgatgccgctgagctcccccaacgccgccgccaccgcctccgacatggacaagaacagcggctccaacagctcctccgcctcttcgggcagcagcaaagggcaacagccgccccgctccgcctcggcggggccagccggcgagtctaaacccaagagcgatggaaagaactccagtggatccaagcgttataatcgcaaacgtgaactttcctaccccaaaaatgaaagttttaacaaccagtcccgtcgctccagttcacagaaaagcaagacttttaacaagatgcctcctcaaaggggcggcggcagcagcaaactctttagctcttcttttaatggtggaagacgagatgaggtagcagaggctcaacgggcagagtttagccctgcccagttctctggtcctaagaagatcaacctgaaccacttgttgaatttcacttttgaaccccgtggccagacgggtcactttgaaggcagtggacatggtagctggggaaagaggaacaagtggggacataagccttttaacaaggaactctttttacaggccaactgccaatttgtggtgtctgaagaccaagactacacagctcattttgctgatcctgatacattagttaactgggactttgtggaacaagtgcgcatttgtagccatgaagtgccatcttgcccaatatgcctctatccacctactgcagccaagataacccgttgtggacacatcttctgctgggcatgcatcctgcactatctttcactgagtgagaagacgtggagtaaatgtcccatctgttacagttctgtgcataagaaggatctcaagagtgttgttgccacagagtcacatcagtatgttgttggtgataccattacgatgcagctgatgaagagggagaaaggggtgttggtggctttgcccaaatccaaatggatgaatgtagaccatcccattcatctaggagatgaacagcacagccagtactccaagttgctgctggcctctaaggagcaggtgctgcaccgggtagttctggaggagaaagtagcactagagcagcagctggcagaggagaagcacactcccgagtcctgctttattgaggcagctatccaggagctcaagactcgggaagaggctctgtcgggattggccggaagcagaagggaggtcactggtgttgtggctgctctggaacaactggtgctgatggctcccttggcgaaggagtctgtttttcaacccaggaagggtgtgctggagtatctgtctgccttcgatgaagaaaccacggaagtttgttctctggacactccttctagacctcttgctctccctctggtagaagaggaggaagcagtgtctgaaccagagcctgaggggttgccagaggcctgtgatgacttggagttagcagatgacaatcttaaagaggggaccatttgcactgagtccagccagcaggaacccatcaccaagtcaggcttcacacgcctcagcagctctccttgttactacttttaccaagcggaagatggacagcatatgttcctgcaccctgtgaatgtgcgctgcctcgtgcgggagtacggcagcctggagaggagccccgagaagatctcagcaactgtggtggagattgctggctactccatgtctgaggatgttcgacagcgtcacagatatctctctcacttgccactcacctgtgagttcagcatctgtgaactggctttgcaacctcctgtggtctctaaggaaaccctagagatgttctcagatgacattgagaagaggaaacgtcagcgccaaaagaaggctcgggaggaacgccgccgagagcgcaggattgagatagaggagaacaagaaacagggcaagtacccagaagtccacattcccctcgagaatctacagcagtttcctgccttcaattcttatacctgctcctctgattctgctttgggtcccaccagcaccgagggccatggggccctctccatttctcctctcagcagaagtccaggttcccatgcagactttctgctgacccctctgtcacccactgccagtcagggcagtccctcattctgcgttgggagtctggaagaagactctcccttcccttcctttgcccagatgctgagggttggaaaagcaaaagcagatgtgtggcccaaaactgctccaaagaaagatgagaacagcttagttcctcctgcccctgtggacagcgacggggagagtgataattcagaccgtgttcctgtgcccagttttcaaaattccttcagccaagctattgaagcagccttcatgaaactggacacaccagctacttcagatcccctctctgaagagaaaggaggaaagaaaagaaaaaaacagaaacagaagctcctgttcagcacctcagtcgtccacaccaagtgacactactggcccaggctaccttctccatctggtttttgtttttgtttttttttcccccatgcttttgtttggctgctgtaatttttaagtatttgagtttgaacagattagctctggggggagggggtttccacaatgtgagggggaaccaagaaaattttaaatacagtgtattttccagcttcctgtctttacaccaaaataaagtattgacacaagagatctcttcctgccaaggtttttagttcattgccagtttagtctttttgacccatgtgtaattaatttttctcaacccaaagtaagattgagtcccctttgagatgcattagagcagtccaacccagaatggcacacactgctctgctgtagcatcatgtcagggcttcctggactcagtacacctctcagtttgtcttttaaaaaacagctgaatctttactacctatttagttctccttgttaaagaaacaggggtgggaataaaatggatttaggacacccagtttgaattgcagtttttttttttctgacacatggccaggctgtggtgccagcttaatggagtaggctgtccttggcacttgcatgtgtgaaaggagggttttgcctcttcttgagcatggcttgagttggtaaggaaagctgtaactcacgaagccctgagacctgctacccctaagatcgagcttgttttcagtgactggcttgagtcataggaggaggagtctggtacagctgcaggagagcagggccatctgaagcggtagcattgccaccatctccctctcatctagagcagttttcttatgccttggtttgagctgaatttgatgtgaattcttttgctgcttaataaagtgacctctaggtgcattagaatgcgaaggcaaatagttgcaataaatcacctgcacaagcattgtgaaaaaaaaaaaaaaaaaa

SEQ ID NO: 856 - DNA, 10590 bp, Homo sapiens
gggcagtcgtttcctgtcgctgcttggtaacaatggggaagataatggctgcctgagcaacgtctccgagcaggcgctgggctagaggcgggtctcaaccagctactcattggaggcgggcttgagagcggcggccagggaggtgcggagcagcctcggcggcggcggccgaaccaaccgagtcggatcctgaccctaaaacctagtattttccacttgttcatcaatatggaaaactcagattccaatgacaaaggaagtggtgatcagtctgcagcacagcgcagaagtcagatggaccgattggatcgagaagaagctttctatcaatttgtaaataacctgagtgaagaagattataggcttatgagagataacaatttgctaggcaccccaggtgaaagtactgaggaagagttgctgagacgactacagcaaattaaagaaggcccaccaccgcaaaactcagatgaaaatagaggaggagactcttcagatgatgtgtctaatggtgactctataatagactggcttaactctgtcagacaaactggaaatacaacaagaagtgggcaaagaggaaaccaatcttggagagcagtgagtcggactaatccaaacagtggtgatttcagattcagtttagagataaatgttaaccgtaataatgggagccaaaattcagagaatgaaaatgagccatctgcaagacgttctagtggagaaaatgtggaaaacaacagccaaaggcaagtggaaaacccacgatctgaatcaacatctgcaaggccatctagatcagaacgaaattcaactgaagcgttaacagaggtcccacctaccagaggtcagaggagggcaagaagcaggagcccagaccatcggagaaccagagcaagagctgaaagaagtaggtcacctctgcatccaatgagtgaaattccacgaagatctcatcatagtatctcatctcagacttttgaacatcctttggtaaatgagacggagggaagttctagaacccggcaccatgtgacattgaggcagcaaatatctgggcctgagttgctaagtagaggtctttttgcagcttctggaacaagaaatgcttctcaaggagcaggttcttcagacacagctgccagtggtgaatctacaggatcaggacagagacctccaaccatagtccttgatcttcaagtaagaagagttcgtcctggagaatatcggcagagagatagcatagccagcagaactcggtctaggtctcagacaccaaacaacactgtcacctatgaaagtgaacgaggaggttttaggcgtacattttcacgttctgagcgggcaggtgtgagaacctatgtcagtaccatcagaattcccattcgtagaatcttaaatactggtttaagtgagactacatctgttgcaattcagaccatgttaaggcagataatgacaggttttggtgagttaagctattttatgtacagtgatagcgactcagagcctactggctcagtctcaaatcgaaatatggaaagggcagagtcacggagtggaagaggaggttctggtggtggtagtagttctggttccagttcgagttccagttccagttcgagttccagttccagttcaagttccagttccagtcctagttccagttccggtggtgaaagttcagaaactagctcagatttatttgaaggcagtaatgaaggaagctcatcatcaggctcatcaggtgccaggcgagagggtcgacatagggccccagtcacatttgatgaaagtggctctttgcccttccttagcctggctcagtttttcctcttaaatgaggatgatgatgaccaacctagaggactcaccaaagaacagattgacaacttggcaatgagaagttttggtgaaaatgatgcattaaaaacctgtagtgtttgcattacagaatatacagaaggcaacaaacttcgtaaactaccttgttcccatgagtaccatgtccactgcatcgatcgctggttatctgagaattctacctgtcctatttgtcgcagagcagtcttagcttctggtaacagagaaagtgttgtgtaattaagatctgaactctcagctatgtagctgatatagtgatgggcaaacaggaatcacttgcttttatgtccactttttgagtggtacttaaatgtaaagtaacaacctgaattgagtcattgctttctgaaggaatcattgtcctttctccagtttttgttccagaataaaaggaaatattttaaaagccacgttataggacctaaaaatctgatttccgtaccagttaaattggtagcatcactgttactgataatttatcatatacacttgtcaatttttcctttgttatcttaaaagatctgccttagcaatggctcctttttcatgttgatctttaaattttcccacaccataagagaggagcaaaggaaattaccagtttagactaagttacagtatgtgtttcataagtgattaaagctatatcattcccagttattagttaacacaaattcagccacattctgagtattgtttgttcacctttcagacttggtgatactggacatgtcagtgtaaataacactaaggttaggatcttctaagtgtataactgtctcctaagcccatcactgtggcacactgtagagtgagcttatagtttaattgagatatttatcttgtggaaatattaaaaagcctatgcttgtgtaagtgaaaaaaaatcacattcatttgtttaaaaatgtaaagctattttgtagaggctcagtacttttccaatgcactgttgtatgaatgcattaaaaattgtaaagtaccatgcttagaactgagaaaactgctttttgtgagccaacatagtaacaaacacaccaaacaaagtacaaagctgcttttgtaagtgtgtagatgtcaagagcagaacatatctataatatttaatgtgtgaacagctactgtgacatgcaaaggaaaggacagtgcagaattaaaccgtgttgaagaccagtggaaattgtataatttaacttggatttaggcaggaagtgaaatatgggaggagtaaagaaaactgaagaatttaaagttttcctgaagacagtaataatgcagacacaaactggtttcatatggtgagagcagccacagcagcagcttgacctggtattctacctgagtagatgaagcagaagatcagcaagtttggcagagttttggtttaagaaaaacaaaccactactacctagcacaagttaaatttacaagtctgctcctcaaaaatgaaaaaatggaggaaagagactataaaaccacttttagcatatgaattgcagttggtacacatgtgtgtgttaataggaaagtctcgaatttgtgttgtttttgagatttgtcatttaaggtaccagtgcacacttgatcatatttcattactatctctaacacagtcctaacatctcaaatttaaagaccagttgaagattaagggatttttatcctttgttgaaagtcatgttgggttatttgaaattcaaattttaattgtgctgcccatatatgaaaatgagactgctgactcgctatctatggacatgcactttatgttggtttcttagtagtaagagtaacttcatgataaccccagtcttcttgcctaatttcttttttgagactagctggggttaggattagaatgactatggagcagatatttgttcttctgggaaaagctttaacaggccaaaatagggattgaacttgtccttggcctttatcaaagcaagctagctacccagacgtagtcaaatactctacaaaataaacaagtctgctttaggaattgtctgggtaccttcactgttaccaacttagctgtaaagattatttcaaagctcactcttccatgatttcttctggctttcaatcctatctaagtatcaaggaaattaacttgtaaatatggtagttgtttactaaggatatgtactgctcttgcaaggaaataatgtccaaacaaagcttcacttattttttttaatataagcagatttcactgtttatggcgcttatgtaatacattttatctttttaaaaatttgtccgtgtaaaagtcaggattcctttatatttgtgagcctccttttctcctttcctaaggatgtaatctacagttttcagatctgcagggtagtcttgattggctaaaaacaaatcaattttcttcttggcataaagtgtttcattattataggggtgttcattttaaatagtttaaaaacaattgcagcacattctaagcataagagaaagttattgacaacaggtaccttcctaatctcccaagacgtacttactcatttgtgaagtattaaagtaagaggtaactcaagcagaatgctggctatgaatgtagatattgaagctattcataaacactggaaatagaattttaagcttttagccttcagtggaatgcacatattggacatgtgcatgtgaacacctttttcagtagcactcacggatttccattcgattgtatagaatgaatacaagtgttttagtggaatttgctacttaatttttaatcttgcgatgtccgtgattattacatgcttactagtgttgtggacattgaagacaaggtcattcgtaggtgtcagattacaatggagaacaaaaatcgttttccccccacccacatccaaacaccattctcgagggagcatttcttgcaaaacaccttacatttcattttctatctttgcactttttcttaagtacagaaaagttgtctttaagacctagtttgaacttcatgcagtaagaggaacaaggataaacaatgttgggagttcacattgttcagagcataaggaaaagtaccaaaacccaaattttcttgaatatttcagatgtttttaaaaactcacttctagtctgaaacatttgaattgttttaactctgagcagctgacaaagttgaggtttttttgttttgttttgttttgttttgtttttttgagacagagtcttacttggttgcccaggatgaagtgcaatggagcgatctcggctcactgcaacctctgcctcctgggttcaagcaattctcctgtctcagcctctcgagtagctgggattacaggcgcatgccaccacacctggctagtttttatatttttagtagagatggggacttcaccgtgttggccaggctggtcttgaactcctgacctcaagtgatgtgcctgcctcggcctccgaaaatgctgggattacaggcgtgagccaccatgtccagccaaagttgaggtttattagtactattagaaacaaaattgagcaagttaagttaaaagtttgctgactttgtatcaacactatagaagatgagccaccttgttaatttggaatatttgctctgaaaagaacatgttagttacaccttaatggtgttaatggaggtggggattgagaaaagtgttcacattagtgttggaatgtaggtaattgtacagtttataagacctttagcaccaggaaataaaatatgtgtgtgtacacacacagtttttaaaaacgattggaattcatccaaaccttaagattaggaaactgattggctgtaagtgttgcctcaagtaatgtgtcccccgccccataacatgtcttttctgtgccaagtatcctctcctagtgtcagtgtctcaaattatatttatgaagggttatcacataatatgctttgtatttaactacctgcttcccaggcgtccatgacatgaaatgggtgaagcatcagccatgactttcggtcagttcccaaaatacccaaatgatagggaggtaaagattgcaaaattcctcttaaaaggccatttttacagcttgctaaaatacagtggcaccttatggttgttaatattttttcttttaaagatggagaatgtttttattcttccccttttctcctttgttcttttgcgaacaaaaaaaattataatctgccttatttgattttttttttaagttttaccttacaggcttccctgtcacatgttttaccatattaagtacatagaagccatgtttgcagggcacttttattctcctagtcttataagactatgctaattgttactttctgaagtattctgtaccttagtatgcaagattgttaaggcacatgttaaagtgtcaggtgtgtttttttccctttaattcttcagtatgtttatattcaataacagtattgtaattcattgagttaactagtaaattgtgtgcttttgaaaaaacatgaaaaatgtaaattgacagcatacttcatttggaaaaaagtaaaagatccgaggaactagtatgtcacttatttatttttattttattttattttttactttttgagacagggtcttgctctgtcacccaggctggagtgcagtggcatggtcacagctcactgcagccttgacttcctgggctcaggtgattctcccacctcagccttccaagtagctgggactacaggcatgcaccacattgcctggctaattttttgtggagatggggtttcgccatgttgtccaggctgttcttgaactcctgggctcaggcaatttgcctgcctcattctcccaaagtgctgggattataggcgtgagccactgcgcccagccttacttatttttaaatcagattttttaatcaactaaaacagctatgagttaagtacctgccctgcaaaaatttttagaaaaagttttaggattatgaaattaagaattattttccttaactggaacagttctaaaatttatctgatacttctctaacaagtgagtgatctcatgtaaccccagtttgtatcttaaaggctgcagcatagaattgagctgtataacagtgttagaactgtcaagtgataatcacagaacagtttgtatcggttttataattctcatgtcttgatcagatctgaaggaaataggcataccctccaacattctaaaaattatttatttttattaggatttgtttattaaagttccacgagctgctttatggtcagttgggctgagtagtagatatcttaaagacatgcagtgaaagtgaaccctgtcatatcatggtgcctctttcaaggttcctctgtaagttcctcatcttgcagaattatttcaataccaaggtatggttgaaccagctgtccagccttaactctatttagtgccccattactaatgttcttttaactggtttgtatgtgttttaactgtccagtgtttggattttacctcttgatagctccatttgtccctggtgctgcttttaaggatgtagggccatgtgatcaggtatcaagttgagtaggtacgcagttggcctggtgatgtatctgtgcctgttttatcttctcccaggaagagctgctttggtatagttgtttacttggattcatacaaagaacagggcagcaatcttggaaagctttctgaagcttataagaacctgaaggggtttggagggggaacagtaacaaaggctgcctttatgtctttggtcacaaagcacatagatgtatgttctgtaaagactaaagtgattgttataccagggcttcctgaccttcgggagagactcaaaaaagcagagaggagcacaaagtgaagttaatttggttggcttgctttatctggtttctcattttctttcaatttaaacctgaacataacacccttctccgatacctatccagcagactcctggttgggaagccctgtattaaattttgagaatgtacacagttttcttttgtacagtgctttacaactgctaaaagttaacttgtttaaagcaaaacaagaccttgaaaggtcaatcatattaaagctggtttgattattaatagttatcttttaggaagaagcttttttccctatgtaagatgtcatactgcagatttaaaatatagactatcaataaaatgcatgaagtgatcatttgtgcttgatcatctctccttgggtttttctttaaaaaggggaatctgctataaaggttctgttgcttcaaaccaatgtcaaatagacttgatttttagagtcatggaattacagtgcaaccttgatttttattcccctcactgctatgagtgtgggcaggtactggtttatatgttataacttccgttttatctgtgttgtgtagttgaatggcttaatcgttgagtggtaaaataaaagattatattccaatacaagaatcctggaaagatttatgtgaatgacattttaagtaggcgcatctttgctgtttcttgtattctcgccattgctctgaccactcccttgcttgccctgtatatatacaaaaacttgtaggtgtgcacgtgtgcttgtacttctgtcttccatttctatcttaatctcttaaacatattgcttaagccactaagatgtccttgtttcaagtaaatcgtcacattgtgacacctggtgtattgtattatagtttcatttcctctggtgcctgcagagctatctgtcattggcatcataactcggtttctcaggatagttttgatgtagtcagctcttcaactcatgaccttcccaaggttttaagtttagtgtcattcatgattttattatttgaaactcaataccaccatcaaaaagttagtgctctagacaatgaagccaaagcacaggcatcttaggtcagtgaaaaggatccagacataaattagccaggtgtggtggtacacagctgtggtcccagctacttgggaggctgaggtggtagaatcacttgagcccgggaggtcaaggctgcagtgagccatgatcatgctgatgcactccagcctgggttacagagcaaaaccttgtctcaaaaaaacccccagatacctagaagaaaggattcgataaatctgggtggattataaactgaactcttaatggtcattttaaaaaataagaaagcaagggtccagtttctttgaggtctttgaatttagacaagatttaactataaggccttgcatggattactaactataattaaattagctaaacttttctggttgctgtcaggcattgtattaagtattctatataaattatttaatcatcacagtgactgtgaggtgaaagtataccacccattttataggtaatgcagctgagatacagatgtttggtaatttgcccaggtcacatagtaagtagcagattatttgcaatcatctttgatgcagtcatcttccttgtgctcttaatcccactactatatgacttctaatttgtttcttagtatttatcccaagccctagactagattgcttatgaggtgtgatttcttaggaaaaacatcagttttggctggtttgccaagaaaaaaaaaggccaaattggtttttgtttatttttttgtttgtttgagatggattctcgccctgtcgcccaggctggagtgcaatggtgcgatcttggctcactgcaacctctgcctctgggttcaaacgattctcctgcctcagcctcccgagtagctgggattacaggcgcccgccaccacgcccagctaatttttctatttttagtagagacagggtttcaccatgttggccaggctggtcttgaacccctgatcccatgatctgcccgtctcggcctcccacagtggtggtattacaggcgtgagccaccacgcccggccgcaaattgttttttgtttttttgttttttggaggattaatggtaatatactgtaaattcagtaaagcactgggcattaccagatacaccttagcactatgaataacatgaactatcattttagcagtttaagtgtaccttgtaatcagccctagggcaaacggtatcaaggtgttttatttccagaagtctcaaaatagactggaataaaaatttggtgaattcatcaacacagacaatgggtccacgtcttgcagctacagctgctgcagctactcctgctgtccgcaccgttccacagtataaatatgctgcgggagtttgcaatcctcagcaacatcttaatgcacagccacaagttacagtgcaacagcctgctattcatgtacaaggtcaggaacctttgactgtttccatgttggcatctgcccctcaagagcaaaagcaaatgttgggtgaatggctgtttcctcttattcaagccatgcaccctactcttgccggtaaaatcactggcgtgttgttggagattgataattcagaacttcttcatatgctcaagtctccagagtcactccattctaaggttgatgaagctgtagctgtactacaagcccaccaagctaaagagactgcccagaaagcagttaacagtgccaccggtgttccaactgtttaaaattgatcagggaccacgaaaagaaacttgtgcttcaccaaagaaaaatatctaaacatcgaaaaacttaaatatggaaaaaaatatcaaaatataaaagaaggaaactgaaaaaaaaaaaaaaaaaaaaaaaaa

SEQ ID NO: 857 - DNA, 2965 bp, Homo sapiens
ggatgaggcctcgccctcgcctctttagtaggtcgggtgagtgtagtgtgcagggaagagacgcgtcagcgccagggccaggcccgcccgggggcagcccggcagccgaatcttgggctactctgtcccaacagccggagcagatcagaccgaccggccctgcccgctcggtcccgcgccctccagaccctacggtctccgtttctaggggcacatggttagcggcaggcgcccacagccaatccactttgccagcctgccccttcctctgccaagagcagcttcttcagccgcgctccagttccgcagacgcctgccccaccctgctcttcccttccagggaagacggatcacgcggccaagaacgagactcgcaaactgggcatttctccgagccgggctagagcaagtagcgagactccgcgtgagagtgggaaagagccttaacaggcaaccatgttgcccagtgggttttctgtgcctttgggtgcggaccaatgaggcgcgtggggcgggacttccgcttcgcctaggtgttgtcgtccctgctagtactccgggctgtgggggtcggtgcggatattcagtcatgaaatcagggtagggacttctcccgcagcgacgcggctggcaagactgtttgtgttgcgggggccggacttcaagagagaaagagagagtgggcagacatcgaagccaaacagcagtatcccggaagcactcatgcaactttggtggcggccactcagttttctctgccagtgtctggtgattttacaacgagatgctgctctccatagggatgctcatgctgtcagccacacaagtctacaccatcttgactgtccagctctttgcattcttaaacctactgcctgtagaagcagacattttagcatataactttgaaaatgcatctcagacatttgatgacctccctgcaagatttggttatagacttccagctgaaggtttaaagggttttttgattaactcaaaaccagagaatgcctgtgaacccatagtgcctccaccagtaaaagacaattcatctggcactttcatcgtgttaattagaagacttgattgtaattttgatataaaggttttaaatgcacagagagcaggatacaaggcagccatagttcacaatgttgattctgatgacctcattagcatgggatccaacgacattgaggtactaaagaaaattgacattccatctgtctttattggtgaatcatcagctaattctctgaaagatgaattcacatatgaaaaagggggccaccttatcttagttccagaatttagtcttcctttggaatactacctaattcccttccttatcatagtgggcatctgtctcatcttgatagtcattttcatgatcacaaaatttgtccaggatagacatagagctagaagaaacagacttcgtaaagatcaacttaagaaacttcctgtacataaattcaagaaaggagatgagtatgatgtatgtgccatttgtttggatgagtatgaagatggagacaaactcagaatccttccctgttcccatgcttatcactgcaagtgtgtagacccttggctaactaaaaccaaaaaaacctgtccagtgtgcaagcaaaaagttgttccttctcaaggcgattcagactctgacacagacagtagtcaagaagaaaatgaagtgacagaacatacccctttactgagacctttagcttctgtcagtgcccagtcatttggggctttatcggaatcccgctcacatcagaacatgacagaatcttcagactatgaggaagacgacaatgaagatactgacagtagtgatgcagaaaatgaaattaatgaacatgatgtcgtggtccagttgcagcctaatggtgaacgggattacaacatagcaaatactgtttgactttcagaagatgattggtttatttccctttaaaatgattaggtatatactgtaatttgattttttgctcccttcaaagatttctgtagaaataacttattttttagtattctacagtttaatcaaattactgaaacaggacttttgatctggtatttatctgccaagaatatacttcattcactaataatagactggtgctgtaactcaagcatcaattcagctcttcttttggaatgaaagtatagccaaaacataaaaaaaaaaaaatcctcagtatagcttgcaattaagacctagatcacagtatttaagtgttttgcgttttatacatgaggtcagtgctacagccacctagcatgaactaacccagcttccacctccataaagttacctagagttgttgagttggaatatgttctggcatttacctgacctgccaatcattagggagaggcaacaaggtaattcagcctttcctcctatcagcacaaagaaactcaaagctgttttttccctttctgttccaaagcagtcttatcctgacaggagcggtctatactagtgcagatttcaacacttttttttaacgttttaattactatagtgttatgtagagatttgattgagcagctaatgtttctgaactttacttactaattttcagtgtccttaagggttctgtagtgttatcaaagcaaaaagaaaatgctgcataaaaataccaaacttcagcaactgttaatactcagatcatatacctcttaataaatagcatcttatgctaattagccctgctaaactatgtacagaggaaactgttcaagtattggatttgaaagtaagtgacttatgtttaacagaactaatgatgtattgaaacactgtattatgaaaagctaaattatacatcattgtaactatgtagaaagtgtagactaatgtataatcaaaatgctaaggatttttatatggccttgtatgaggggagtttgaatgttaataaacatgttttccactttaagatccagtaaa

SEQ ID NO: 858 - DNA, 2195 bp, Homo sapiens
gggtggcgccaaggaaggaggagaaaaggcggccgagaaaaggaggagggcaaggggaagaggaagggcgagggaggagcctgaggagactcgcccggctcaaccccgacgtccgcgccccggccgcctgttggccatggcgggcctgggcctgggctccgccgttcccgtgtggctggccgaggacgacctcggctgcatcatctgccaggggctgctggactggcccgccacgctgccctgcggccacagcttctgccgccactgcctggaggccctgtggggcgcccgcgacgcccgccgctgggcctgccccacttgccgccagggcgccgcgcagcagccgcacctgcggaagaacacgctactgcaggacctggccgacaagtaccgccgcgccgcacgcgagatacaggcgggctccgaccctgcccactgcccctgcccgggctccagttccctctccagcgcggccgcgaggccccggcgccgcccggaactgcagcgggtggcagtagagaagagcatcacagaagttgctcaggagctgacagagctggtggaacatcttgtagacattgtcagaagcctgcagaatcagaggcccctatcagaatctggaccagacaacgaactgagcatcctgggcaaggctttttcttctggggtggatctttccatggcttctccaaagctggtgacttccgacacagctgcagggaaaatcagagatattctccatgacctagaagaaattcaggaaaaattacaagaaagcgtcacctggaaagaggctcctgaagcacaaatgcagggagaactcctggaagccccgtcttcctcctcatgcccattgcctgaccagagccaccctgcactcaggagagcttctcggtttgctcagtgggccatccatccaacctttaacttgaagagcctttcctgcagcctggaggtgtccaaggattcccgtacagtgactgtgtctcaccgcccacaaccctatcgctggagctgtgagaggttttctaccagccaggtcttatgttcccaggccctgtcttctggaaagcattactgggaagtggacactaggaattgcagccactgggcagttggggtggcttcctgggagatgagccgcgaccaggtcctgggaaggactatggactcttgttgtgtggaatggaaggggactagccagctctctgcatggcacatggtcaaggaaactgtccttggctcagacagacctggggtggtgggcatctggctgaaccttgaggagggaaagcttgccttctattcagtggacaatcaggagaagcttctgtatgagtgtaccatctctgcctcctctcctttgtaccctgccttctggctgtatggcttacatcctggaaattacctgataataaagcaagtaaaggtgtaaggtttcctaagggattacaacacagtggtttcctggtctctctccctgtcatcaatcagggtagtaacttgacttaagaataccactttttagaaaaattacgatagagatgggatctcactaggttgcccaggctggtgtcgaattcctggtctcaagcagtcctcccacctcagcctcccaaggtgctgggattacaggtgtgagccaccacacctggccaagaataccacttttgaagttaatccttttgtgtgatacaggatgaacttgggatgtttgaaccctggacattccaaataaagaataggcccctgcctggctcctgggagataacctctaagccattagaatatcttgcctgataagagtgtttttgtttacctgtgggccttgggccatgcagtatcagcttgaccttgcaaggtcaagctgaggagactaagttagccatgtgggcagtgaagcatgccaatgtgatcaatccctagtaaaagccctggacacctaggcatgggtgagctactctggttggtaatactctgtgcacacatcattgtagccacacatcattgctgggagaattaagcattatcctgaagactctgccaggagaggataattggaagttctcttggaccttaccttatgtgcctttcttcattgctgattttaatctgtatcctttcactgtaataaactgtaactatgagtgcaaaaaaaaaaaaaaaaaaaaaaaaaaaaaaaaaaaaaaaaaaaa

SEQ ID NO: 859 - DNA, 3321 bp, Homo sapiens
gctgcgggctactgggcctgcgctgccgggctttgggttctgggcctctgccgctctctggccctaagtgctgagctgccgggaacggcagcttctgacgctgggccattggacgctgcggaaccaggcttcttcactttgagtttccgccgcgaagcgccagtccgggccgaggagggagcctttactacttctccctggtttcattcatgttctgaggagggtgtgagaaggaaccatggatcccacagccttggtggaagccattgtggaagaagtggcctgtcccatctgtatgaccttcctgagggagcccatgagcattgactgtggccacagcttctgccacagctgtctctctggactctgggagatcccaggagaatcccagaactggggttacacctgtcccctctgtcgagctcctgtccagccaaggaacctgcggcctaattggcagctggccaatgttgtagaaaaagtccgtctgctaaggctacatccaggaatggggctgaagggtgacctgtgtgagcgccatggggaaaagctgaagatgttctgcaaagaggatgtcttgataatgtgtgaggcctgcagccagtccccagagcatgaggcccacagtgttgtgccaatggaggatgttgcctgggagtacaagtgggaacttcatgaggccctcgaacatctgaagaaagagcaagaagaggcctggaagcttgaagttggtgaaaggaaacgaactgccacctggaagatacaggtggaaacccgaaaacagagtattgtatgggagtttgaaaaataccagcgattactagagaaaaagcagccaccacatcggcagctgggggcagaggtagcagcagctctggccagcctacagcgggaggcagcggagaccatgcagaaactggagttgaaccatagcgagctcatccagcagagccaggtcctgtggaggatgattgcagagttgaaagagaggtcgcagaggcctgtccgctggatgttgcaggatattcaggaagtgttaaacaggagcaaatcttggagcttgcagcagccagaaccaatctccctggagttgaagacagattgccgtgtgctggggctaagagagatcctgaagacttatgcagctgatgtgcgcttggatccagatactgcttactcccgtctcatcgtgtctgaggacagaaaacgtgtgcactatggagacaccaaccagaaactgccagacaatcctgagagattttaccgctataatatcgtcctgggaagccagtgcatctcctcaggccggcactactgggaggtggaggtgggagacaggtctgagtggggcctgggagtatgtaagcaaaatgtagaccggaaggaggtggtctacttatccccccactatggattctgggtgataaggctgaggaagggaaatgagtaccgagcaggcaccgatgagtacccaatcctgtccttgccggtccctcctcgccgggtgggaatcttcgtggattatgaggcccatgacatttctttctacaatgtgactgactgtggctcccacatcttcactttcccccgctatcccttccctgggcgcctcctgccctattttagtccttgctacagcattggaaccaacaacactgctcctctggccatctgctccctggatggggaggactaagaaagctaccaccctaaccacagaggcttggaattgggcctggcccccatggggcttggaggaccgagccactgacaggtatcccctgaaactgagctgagcccagtatccaaggattcctctgtctgatcctttggtctttgctaccaggctgaagtctgtcatgaaaccacttattttaaaaagcagaggcccagtcaaatgagcattgcatcccatgagggaagcacgacagggctgatggtgaggatcagagcagttctaaggtgactcgttggggtaaggatcaggactttgtccatgtagtagccaaccaccctcttccctgattcccgtccggtgtcacagttcagtcagtgaggatgatgaagtagatacagtcttcaggacaccattagatgggctttcccaataggccaaaaaaatgctgcgcatacccagagctggttgttgtgctgaggccagtcagaggatgcttcccctgaggtttgctataactaagcaacctttatgtgactctcaccttctgacctcctggcaagagaaattcagtgcagcagggggacacagacctgcccaagccaccccactgccgttccctctctgagcacaagctgggcaaatcactgtcccttggactccaggagaccagtgtcctagtcttgccttttttctctaagtggcaggatcagaaaacctgcgagctttagtttgtattttcactttatgaatgaggaaactgaaatggccttaagggagcaagttatttctttttttttgacacggagtctcactctgttgcccaggctggagtgcagtggcacgatctcggctcactgcaggctctgcctcctgggttcacgccattctcctgcctcagcttcccgagtagctgggactacaggcgcccaccacgacgcctggctcatttttttgtatttttagtagagacggagtttcaccatgttagctaggatggtctcgatctcctgacctcatgatccgccctcctcagcctcccacagtgctgggattagaggcatgagccactgcgcccggcccctggagcaagttatttcttacaaagctgctgaaggtaagattatcaaaattataaagcatttttcacactcaagtgaaacaaggttgacaaactcacttcgcaggtcacatgcctatacatcacttattatatttgggtctgaaacttctcacatgtttgggaggttttatgtgtcctcattgggaaaatgggtgtaattcagcataaaacctcatatgattgtcctgcctcatggagctgttgtatagatcccagatccatcccatgatttgttcctgtctgaggcatagaggcaggcaagccgtggattttgcacatggtgactttcccactgtgccatgatacagtctgcatcttatagcagtgcctttgtctcagggcctctgctggcagtctagaccttttgggcagaaaggagcttcaaatggctgtgataaggaatattaaaaattgtgtttctactttaattgtattggctgttcatgtatgtaggagttaaaataggccaaactggagaaataaacgcattctgtccaccatgaaaaaaaaaaaaaaaaaaaaa

SEQ ID NO: 860 - DNA, 3144 bp, Homo sapiens
gccggcggtcgcgccagcgggatccgcctggctcagctgacagctcccgagaacggaagaggcggcgcgccggttgagcagggcgtctctaggcctggtcggctggcggcgatggcaggattttcataatatatgtagtatgagttccacatcttggcctcttacccagcttcagcagtctcagctccaccagttagagaataaatgggatttgcatgaactccactctgagctgaaatacagactgcggtgttaatatccttttcttctgattgttattaacaggtccttatgtcgtcagaagatcgagaagctcaggaggatgaattgctggccctggcaagtatttacgatggagatgaatttagaaaagcagagtctgtccaaggtggagaaaccaggatctatttggatttgccacagaatttcaagatatttgtgagcggcaattcaaatgagtgtctccagaatagtggctttgaatacaccatttgctttctgcctccacttgtgctgaactttgaactgccaccagattatccatcctcttccccaccttcattcacacttagtggcaaatggctgtcaccaactcagctatctgctctatgcaagcacttagacaacctatgggaagaacaccgtggcagcgtggtcctgtttgcctggatgcaatttcttaaggaagagaccctagcatacttgaatattgtctctccttttgagctcaagattggttctcagaaaaaagtgcagagaaggacagctcaagcttctcccaacacagagctagattttggaggagctgctggatctgatgtagaccaagaggaaattgtggatgagagagcagtgcaggatgtggaatcactgtcaaatctgatccaggaaatcttggactttgatcaagctcagcagataaaatgctttaatagtaaattgttcctgtgcagtatctgtttctgtgagaagctgggtagtgaatgcatgtacttcttggagtgcaggcatgtgtactgcaaagcctgtctgaaggactactttgaaatccagatcagagatggccaggttcaatgcctcaactgcccagaaccaaagtgcccttcggtggccactcctggtcaggtcaaagagttagtggaagcagagttatttgcccgttatgaccgccttctcctccagtcctccttggacctgatggcagatgtggtgtactgcccccggccgtgctgccagctgcctgtgatgcaggaacctggctgcaccatgggtatctgctccagctgcaattttgccttctgtactttgtgcaggttgacctaccatggggtctccccatgtaaggtgactgcagagaaattaatggacttacgaaatgaatacctgcaagcggatgaggctaataaaagacttttggatcaaaggtatggtaagagagtgattcagaaggcactggaagagatggaaagtaaggagtggctagagaagaactcaaagagctgcccatgttgtggaactcccatagagaaattagacggatgtaacaagatgacatgtactggctgtatgcaatatttctgttggatttgcatgggttctctctctagagcaaacccttacaaacatttcaatgaccctggttcaccatgttttaaccggctgttttatgctgtggatgttgacgacgatatttgggaagatgaggtagaagactagttaactactgctcaagatatggaagtggattgtttttccctaatcttccgtcaagtacacaaagtaactttgcgggatatttagggtactattcattcactcttcctgcgtagaagatatggaagaacgaggtttatattttcatgtggtactactgaagaaggtgcattgatacatttttaaatgtaagttgagaaaaatttataagccaaaggttcagaaaattaaactacagaatattaaatattataatgtgcccaaagctctgaatagttaaaaattaaatatttattttcttccccaagctttaggtaaggagaagaggggtcaagagttaaacttagagaccctttgtctctgagaagcatccttctaagacattctgttggagttccctcagtactattccttacaactggagtgggtagaagccttatgaaaattatactgagaacctgatctcgtttactccatgttaatcacattcctaccaacctaaatttctgccaagtcagttctctttggaggaagcccattactccgtaactgactggatggtccagtgtcattttgatctgcttttcagaatggaaatttataatataaatatatgttttaataccacaaacactgtggggcacttgatatttattagtggtgtatatggtccactggtttcaggccaaatctagaatttagtgatactggctcagaagaatttaagttctattcagccttcctgggtgttagaacctagattcaaaatggcttgtctttgctacttttgttccacattctctctctttacctttgccctaccttctgtttgtaaggatgattttaatattaattccaggaacacatgtttttatttcctctgctggaataggagaaagcttaatatattcccaagctgaatgttcttgaattatatctgcatttaccactgtatatgcatatagtgacagtataacctgtctatactacagtagttccagtcctaactttctgaattatttttaaagatcttctctaacaagctatgggaatttggcttcatactctttctttgcaacagcagtgttctgggtgataattttgaattgatacctgttcctttttctgggttttgttggctttttgaaaaattgtctttccttatcattggtgggaggcttggtagcaaagtaacattttttggaaaagaggacagaaaaattgaactacagcttgagaacgtattctttttttcctactttgttattgcaaattgaggaatcacttttaactgttttaggtgtgtgtgtccagagtgagcaaggattatgtttttggattgtcaaagaggatgcttagtcttaaaataaaaataaatttaaaaatcatcttataattagaaaaaaaaaaaaaaaaaaaaaaaaaaaaaaa

SEQ ID NO: 861 - DNA, 5740 bp, Homo sapiens
gagcctcccgcgtgcccggcctctgtgcgcgctcgcgccccgcccgcgcagccgcttctccccgcgcgggctctcggcaggcgggaggcggcagggctggcattgcagtgcgggccgtgcgggctgcgcgggcgcggggaggcgcgggcggcaaactgcgggcacccggcaccccgcagccagtaccgggcggaggcgtcagagccgcgcaccgcggacgagcaggcccaggcatccagtaccctgctgactctgacatgcccccagcctcccccagctctgcagggagccctggtgccagagaccttctcccatttctccctatgggtgcctgacctgagggcagagacatctgagtgtgtataagcacagcaggacaccaggacctggcctgaagacatttcctctcctcccctctggatttctcagagactgttctgcgatgaccacaacaaggtaccggcccacctgggacctggccctcgacccgctggtgtcttgcaagctctgtcttggggagtacccagtggagcagatgacaaccatagcccagtgccaatgcatcttctgtactctgtgcctgaaacagtatgttgagctcttgatcaaagaaggattagaaactgcaattagctgcccagatgctgcctgccctaaacagggccacctacaggagaacgagattgagtgcatggttgcagctgaaattatgcaaagatataaaaagctacaatttgaaagagaggtgctgtttgatccctgtcggacttggtgcccggcgtccacctgccaagctgtgtgtcagctccaggacgtggggctgcagaccccccagccagtgcagtgcaaagcctgccgtatggaattctgctccacctgcaaagccagctggcaccctggccagggctgcccggagaccatgccgatcaccttcctccccggggagaccagtgctgctttcaaaatggaagaagatgacgcgcccatcaagcgctgccccaagtgcaaagtctacatcgagcgagacgaaggctgcgcgcagatgatgtgcaagaactgcaagcacgccttctgctggtactgcctggagtctctggacgatgatttccttctgatacactacgataagggaccctgccggaacaagctgggccactcccgggcatctgtgatctggcatcggacacaggttgtgggcatttttgcaggatttgggctgctgctcttggtggcctcacctttcctactcctggccactccctttgtactttgctgcaagtgcaagtgcagtaaaggtgacgacgacccgttacccacctagaggaagcgcgatgctggaacacatccctgcctccgggaagtgtggctctcccccaaccctccccaccgtccccccttcactaaacatctttcttgccttatgtgccccattgagcttcacagtgtcaggctggacgccgtgatttcagggacctatgtcacaatgttcgctgaggccccaggtgtggtggggaggggaggcaggtgtgggtagcgcacatccccacagatcaatctctgcagatgacagggaggtgctgtgagaagtgcaccaggcagctttctctctgtggtagactaggcatgtctggggatggcctaagagactttctgctccttggcttctagatggcaccatgttgtcagagaagtcttttaaggactgccactctcttcagacagaatctgattattccagcttgagagaagcactctgtttatgacaactgtttttattactaatggcatttagtaaaatcctttttagaaggtattttttttccaactgagtagtgaaaatcaacaaggtgcatataaaccatcctatgcctttcttgaaatgtgcattttaagaagttatagttaaacgacttttcaggagatttagaaagccttatgcactctttgtgtttttcttgaaacttgctgtagtaactttttgaacgctgtaagctgtgtactgttataagtgtgcttcctatattgttgcatttccttgataatattgacgtgtttaaaggaacatctcatctccattagatttgccttttgttgttttctctctttggtgattcagctcagctcatgggcctcatcccttctctcccaggtagcagaaaacgctttttattgtattcaatcccactgctttgctcggcaatggttctcctccgaattgctgccgtctggcctctggcctcagtcttcagatagacagtaagaagaaagcagcctcattgatccgcagatgtaggggcctcttggcagaggctggaggactctgggggctagggaagagcctgccagattttcacatttttaaaatgttctagtcattttgagaaatcatatatcttacacagttccaagtcctgttgctaaccgttttgctcttgttggggaaaagaacctcccatttcacttcgttttaacgtggggattttaccacttgatcttttacagggctgtctgtgaccatttccatggcagcaggatgcagggattaataaggacacatacacattattccaccaattgactttgaaaagtggagaaagtgtattctttaaagagaatttacttctaaaagccacaggtgcttttacaaagcaaactgcattgaatttaaaacttctaaaaataacaggcaaatattgtagctatattacagtgggattttaaaaatcttgttaaacattctataaagaagtaaaacaaaatccttttatctcagttatttgcccatcacaagcacatttttaaaatgttgctttgtgtgtgtttgacttctgcatttgagtatcagtctcaggtcctagtttactttccctggttggaaatttatttcttatttcctaacattgaattcgttagaaaaaacagcgtcacctcactcttcacctgtcatgttgattttccttatgaacccgaagccatttagaaaatccctgtgtgtcaaaattacattcaaaaagctctccttgtaattgcaagtttagtaactcagtaagaacatgcctgcgactccctttctggatggaacctgggctgtggctctctgtcgtttgtggtgctgtgatggtgtctactgttagaatagcttttctggaggtgggtggcaactccacgcgggagtcattggctgggcttgagccctcagcctgtgatatgtggatgcagctgtccagccactgccctttaacatgcccagcacacatgggaggcctgtggccctgtgtccagtggcccacaggacacgcctccaccatatgctcatccttcctgcctgaaattgctgctgcccatcgcatgagcccacacagtagcacccccgtccttaggatgagagtcagagcctttggaaaggctgcatccccagggctagagctcagatgaccttatttctagagggacaggctgttctgttggaagagtctctggcccagtcatgcacatctgtagccccagccatccttgtgccttcacctctgatgtgtttcacaagcacgtagttcaacccagatagggaccacagagattctggggccagccaggggcagtcaaattggcacctactggctctgactttttgtatgaagcatgcctcagtttcctcattttgatctagatataaaattaaaattgtccatttcctatataaataccagcaagatcactctgagatacataaactcgcatttccttctgttttagtaaggagtgccagacttatctttgatgggaatacagtatgaaccctgcttgatgtaaaatggaaatagcacacaggcagatggccctgggtttggactttgatcttgccatcattccccagtaaaacctggggagttctgcgttgagtggacggacttattcctgtgaagcggcataatttgtctccattgaaaaatggcattcactcttacagatggtgttcactgcaagccccagaagcatatggcatgtgttcactaagaggcctttaatcctggggagtaaggggcgaaggcccttagacaaccatggctgctgtactgccgcccagggtgggtggccagtgaggactggccttagcccagtggacctgtggcttctctgaggcccttgagtaactgaccacatttggaggttttgctggaaatgcctgacctctcagtctggctctgctgtgtagtccatagcccagccagatgagcttgcagcctcataggaggtcagcaccttgcaaagatgcagtcaccatagatgtccacgtagcagagactgacttaggatctgagataaagcatcggattgcaggaataactgtccaaattagttcttcctcctcaactcataggagtagctgtggacagaggaaccaacatctgccacctctggcattttctttctttttttttctttttgagacggagtttcgcttttgtcccccaagctggagtacaatgacaggatctcggctcactgcaagctctgcctcccgggttcaagcgattctcctgcctcagcctcccaagtagctgggattacaggcacccaccacctcacccagctaatttttgtattttcagtagagacggggtttcaccatgttggccaggctactctcaaactcctgacctcaggtgatctgcccacctcggcttcccaaagtgctggaattacaggcctgagccaccccacccggcctattttcttaaaggggaacaaatgatcttgacaacatattattccataaaaccagtttagggcacaggccagttcctgattagaacacaggacctgtgggagggactatcagagatgcaaaaattacttcaagatgagtttattgttttcatttgtattgcaaaagttagaagtcattttacaaattaaaaaaacatttttttcttggtagtctttaaaaattaggggattgaaaggatccaggatgggctttgtgtgtgtgtctcagattctcatttattagtgagcacacctgtgtatatatataaatcacaaggagatcatcaagggaaaacattttgcatgtgtaaagcttcatgaagttctctttaaaaaataccaaagcttgtttatttctgataattaacctaagcccttatgaaaataaacaaaatgaagggattatgacaggtattaccaaaaacaccaaaaggaacaaaggggcctgcgttaaaacctaattgctaatgcttcacaactaggagagcatgccgtcttgatgtttaaaaaacccagggtctccacccttcctttgatttgtgcaattctgtcttccacagttccggagccttcagtgaggggtagctacatgccccatgcctgccctttctttccttctttgctcactttactatgggtgtattttaatcttgtataaaaatatgcatgaatgagtcatgcacatgtatacgttatgtatttgacaagtggtggtgaaacaaaatcaaaacagatttgatttgtgtttttgaaatgtcagtacattttgtgccactaacactgtgatgtataaaagagctgtttgaatgccttttaatgttgtgttttgtactctggaatcatatggaaaaagtttgatttgtaatttcaatacatattttaaatgtattgtgtcttacgtagtttgtccccccctttagcagggattcctttttaaagctattttggctggaatacaggtgacttttgtaaa

SEQ ID NO: 862 - DNA, 2163 bp, Homo sapiens
ctaatcttccagttgccccctattgactttaaaccaaagctttgattcatgaccactgggatccagccagcgggggatttcttttcctgatggactgtacccaggatctcacatttgcttaagcagctcccacaattgggttcttataaaaggacacggaagagacaagctcagttttctctgaaggagaaggactgcacttagaactgcattttggcgacctctgaaattcagtactgcagtgaatgagcttctgatcttgaggtgaacttaacaaaattatttttggaaaaatcgttgtgggaaccattaaaagaactccaggaaacatgaattctggaatcttacaggtctttcagggggaactcatctgccccctgtgcatgaactacttcatagacccggtcaccatagactgtgggcacagcttttgcaggccttgtttctacctcaactggcaagacatcccatttcttgtccagtgctctgaatgcacaaagtcaaccgagcagataaacctcaaaaccaacattcatttgaagaagatggcttctcttgccagaaaagtcagtctctggctattcctgagctctgaggagcaaatgtgtggcactcacagggagacaaagaagatattctgtgaagtggacaggagcctgctctgtttgctgtgctccagctctcaggagcaccggtatcacagacaccgtcccattgagtgggctgctgaggaacaccgggagaagcttttacagaaaatgcagtctttgtgggaaaaagcttgtgaaaatcacagaaacctgaatgtggaaaccaccagaaccagatgctggaaggattatgtgaatttaaggctagaagcaattagagctgagtatcagaagatgcctgcatttcatcatgaagaagaaaaacataatttggagatgctgaaaaagaaggggaaagaaatttttcatcgacttcatttaagtaaagccaaaatggctcataggatggagattttaagaggaatgtatgaggagctgaacgaaatgtgccataaaccagatgtggagctacttcaggcttttggagacatattacacaggagtgagtccgtgctgctgcacatgccccagcctctgaatccagagctcagtgcagggcccatcactggactgagggacaggctcaaccaattccgagtgcatattactctgcatcatgaagaagccaacaatgatatctttctgtatgaaattttgagaagcatgtgtattggatgtgaccatcaagatgtaccctatttcactgcaacacctagaagttttcttgcatggggtgttcagactttcacctcgggcaaatattactgggaggtccatgtaggggactcctggaattgggcttttggtgtctgtaatatgtatcggaaagagaagaatcagaatgagaagatagatggaaaggcgggactctttcttcttgggtgtgttaagaatgacattcaatgcagtctctttaccacctccccacttatgctgcaatatatcccaaaacctaccagccgagtaggattattcctggattgtgaggctaagactgtgagctttgttgatgttaatcaaagctccctaatatacaccatccctaattgctctttctcacctcctctcaggcctatcttttgctgtattcacttctgaccagagacaaatcagaaatgtgttcacatgctgtgggaacccctttatcccaggaagtcctcttccttgtgccttaacatacaggacaaataggctctattttatgtcttgaattgccttctaatgttatcaaaactcatttattgtgttactattaaatatgctgaaaacgctaaaagtatacgtattggttctttattaaataatttttgaaaaatcattattcatgatcatggcatacagtatattctcttttttttctttatttatgactgtcactgagtgaaataatagatgacagacatgtctgaatgaagtaaaaatcaatggaagacagtcgggatcttttgcttcatgcaaaaaacttggagtgaagtctcaatgataactgggaaatgtttttcttcctctttatctaactatattacacttatccatcaggtttcattgtattaatctatcctttgaggtaata

SEQ ID NO: 863 - DNA, 3551 bp, Homo sapiens
gcgcctccgcccctcgctcgctcgctccttcccgccctccccgcagcgccggccgagccggcttcccctcagtctctcatgaatattgagcggcccctgttgtatttcccgagctccattgcggaagctgaggctcgccatattgtgcggcggcgccggcgtccgcggcagctgataccagagtcttgctccggccgcggccagcggagccctgggctggggcaggagccgcaatgtctcaggctgtgcagacaaacggaactcaaccattaagcaaaacatgggaactcagtttatatgagttacaacgaacacctcaggaggcaataacagatggcttagaaattgtggtttcacctcgaagtctacacagtgaattaatgtgcccaatttgtttggatatgttgaagaacaccatgactacaaaggagtgtttacatcgtttttgtgcagactgcatcatcacagcccttagaagtggcaacaaagaatgtcctacctgtcggaaaaaactagtttccaaaagatcactaaggccagacccaaactttgatgcactcatcagcaaaatttatccaagtcgtgatgagtatgaagctcatcaagagagagtattagccaggatcaacaagcacaataatcagcaagcactcagtcacagcattgaggaaggactgaagatacaggccatgaacagactgcagcgaggcaagaaacaacagattgaaaatggtagtggagcagaagataatggtgacagttcacactgcagtaatgcatccacacatagcaatcaggaagcaggccctagtaacaaacggaccaaaacatctgatgattctgggctagagcttgataataacaatgcagcaatggcaattgatccagtaatggatggtgctagtgaaattgaattagtattcaggcctcatcccacacttatggaaaaagatgacagtgcacagacgagatacataaagacttctggtaacgccactgttgatcacttatccaagtatctggctgtgaggttagctttagaagaacttcgaagcaaaggtgaatcaaaccagatgaaccttgatacagccagtgagaagcagtataccatttatatagcaacagccagtggccagttcactgtattaaatggctctttttctttggaattggtcagtgagaaatactggaaagtgaacaaacccatggaactttattacgcacctacaaaggagcacaaatgagcctttaaaaaccaattctgagactgaacttttttatagcctatttctttaatattaaagatgtactggcattacttttatggacagatcttggatatgttgttcaattttctttctgagccagactagtttacgctattcaaatcttttcccctttatttaagatttcctttttggaagggactgcaattattcagtatttttttctttcctttaaaaaaatatatctgaagtttcttgtgtttttttttttccccacaaagtgtgtttccacttggagcaccattttgacccaggaatttttcatagtttctgtattcttataagattcagttggctgtccttttcctgctcccctcaaaagatttttagtcatacagaatgttaaatattatgtattctgactttttttttcccccggagtcttgtatatttatagttttctatataaactgtagtatcttcatgaagacccaaggctcaaatttactgtccttaaaaacaattctcataggattattcttttcatggtattttcttccataatatctcattttaaaaagaagttctttatgaacttagtgtccattgtcatgcaatgtttttttttttccattctttttccctgtaattttggaatttctggtcctgggaagaatcaaacaaaatcttaagttctatgagaacttggttcattgacatattctgctgaagaaagaaaaattaaattggtagtaaaatatagtcttcaagtatacgtttgagagtgcttttttttgtattagttctgctgtcacttcatttcctgtattatatgtgatgtttttccccattaaaataccagagataatggagatattttgcactttagccttgatgaaaagtacaagatatgttcaaagcttccctaatttttttcttatttgtagccacataagtttcaagaataacatggcacacagaacaatggaaaaaagtttgtttccattggaaaattatatcattttgggttgccacatcagtttataaatttggcgctcttttaattacactctgtagaaggttaatagagcttgagccctgctttaatatgtagtgaaagataattctgtagaaaaacgtcagccagtagggtaaagtcattctactgttcttaatttttatattgaggaacaatattgggtgtttgggagccagaaagctttgttgacagatcagaaataagattgacttgggtgttatatttcatctctctccagactctaggtatatttccaactttatatatcacagtatttaaaaagacatgtttgcattgagaaattaaccctaaagggttttcaatagggtgtagacctccagtacctttgtaactaaagtctgtctagtcattgtaaatatttatctgtcagttttgacagattggggccagcttgatgttttaaatcttcagcccggtatgaaaacttaaaggtatatattcaattttttaccattttatggaaaatatttaaaatctgtttttacagggttttttttttttttttttttttgtaatctgtgccatgaaatttgaaaaccaccaaaaatcaagggaacttttatatattcaattccttttctggtgtaatgttaaagttgtatagattattaatgcatgcccactgaatataaccctggttttgtgataaaactgcttagattttgttgatgacattagattagtagttgcattaaataactaaattcccattgtgattaattgaaattttgtctttaagcagagagttatttgtgactataagctttgtgcttagagaatgtatgtgtttttatctgtcagtatgggaggatataaactgcatcattagtgaaattattggttgtgtaatcctttgtgaaatataattctaggtatttgatagggtattgagtgtattttgtgtgtgtgtggatgtgtgttttggggtacggggagaggcgatgctattggccatcactaccaaccagggtttcaaaaagtattacctaagtaatttcttttatcactatctcaactgaggaagaaaaggctcaccacaagtggtgtgaaggctttgggtacttagttctaaatttttttatggtaacatatacatagccacatttacagttttaaccattttaaggcatgtaattcagtggggttaggtacattcacaatgttgtgtaatgatcaccgctgtctacttgtaaaactttttcatcaccccaaacagaaactctgtgtgcaattaaagtaatgcatttctcttcttcttaacccct

SEQ ID NO: 864 - DNA, 3374 bp, Homo sapiens
gcggccgccgcccccgggctggggtttgggggaccgagccgctccgggttcgggatgctgaggagaccgcgggcccgcgccagcctcccacacacacacactctcccggcgcctcggccggccgggcgcggtgtgcaggggtgaggcggtgtctccaggctgaggagggacgcggaggagggtccggcgcggccccgggactggagggtgagtccctcacaaagggcggagcggggctgtcacctggagatcacggagggaagttcatccatgagctcggatttcccacattacaacttcaggatgcctaatattggattccagaatctgcctctcaacatatatattgtggtttttggtactgctatatttgtcttcatccttagtttactcttctgttgctacttgattaggctaagacatcaagcacacaaagaattttatgcctacaaacaggttatattaaaagagaaagtaaaagaattgaatttacatgagctctgtgcagtgtgcctagaagacttcaagcctcgagatgagttggggatttgcccatgtaagcacgccttccacagaaagtgccttattaagtggctggaggttcgtaaagtgtgtcccctgtgcaacatgccagttctacagctggcccagttgcacagtaagcaggaccgtggaccccctcaggggccccttcctggggcagagaacattgtatagcttaccgcaaggatcagactgttgctggacacgacgtctgtgtggagccaggaggaacacatgtggtgtctgtatggctgctctctacctaggacaccagctgccacttcttttgcctcatgaagaactcttgggccagccaaactgggaacctaggtgtctgggtcttgtgacaaccaaagcactttgacactaccccctgccgagagaagaggagtggatgagcctgcgggtttgcctcaagaaacttcatgagggtctcttactaactccattacactctctctcctggagcctcatctccatgtcaagcaggagggtaaagaagggaactaagagcaggtctttcaagccacacccccacctgcggatggatgggtttctctgtaggccatgcaggcctttgtcgcagcaaaccttcccagcagcccttgagccaagtaaaaccagcacaaccagccaccagtggttggtgaggcagtgcccacaaggctcatgttgtatgcctttgataaggccatcttggctttgagtagcagtgttcctcgtcacccatttccccctcaggattacaacacctgctatcaaatcatctaagctgaaaacatgagatgcgcttggaaaggcctagtcagaagccatttcctcttatcatttccctctcctatgcaccagtaaggcccgtccagagccccagcagggagtgggccctgagtccacactgtccctgagtgatccaggaggctgcccacatccccacatgtgcactgtggttccagtgtagctgctgtgagcccactgccactgcctcagaagggagccactgtgaacctctcgagtggctccaaagagcagtggctttttgagaatggcccatacttctggcccggctggatgaagggaatgccgaccctttggcctctccccctccttccatctcttctctctcttgccctatctctctttctacttcagaaaaaaaaaaaaaaaaaaaaaaaagcctgtcattcactttttaacactttatcccaaataagatccctgtgtaattctgaagctggtgatccacttggaattgtagatagtttcaggaagctcctgcagggctgtccaccgttggtgtgtgcctcagtatttggacttccgaaactgaaagtgaaagtgtctttataggagagaaacgcatgctgctctttggctctttctgtccaacttttctagaaatgactcaaagtccattaagatttgtgaatattgtataaattagctatggaaagtagcaggtcagatggaaaattcttttccacagccctgctctccgcctccctccatcttaggagcgcctgcctcaattcctcgtcaactgctttgctccactccatcccacaggtgtgagtgggggaagtttttcattaggaatacagtctgcgtgacatggagaatggatggagggagctttgctactctgctcttggcatgactccaggatttttttctggaatccaacctctgtcctcttaggagaaggaacctgtccttggttcagatggctgggcatgaggaggaaaatttccattagtgtagaacagtgctggacagaatccggtttggaaaattacaaatccagttggtcaaaataggccatttcctatgtgtgacctattcgtggtatgccaactggactgcttcctaaacaggacgaggaaagtgaggaatatttttatatgaaagccttagcctgtctggcacccatgaaaaaaactatttatgcactcctactttcaccgtctttttgcattctctatttgtagcacaacagagttgaatgccacaaaacaccccgtttatagtgagctgttttcagtgaccaatatcagaaggaggcttgcttctggactagcctcactaattgccagcagccaccattttccatggaatggccttgggacagatgtcacctctgttatggggctctaataggaaagagaatgttttttcccttcctatgatcaatactgcaaattattgctgctcacagcttttataggattctcccaactgaaagttgcaggctttttctgtccctgtgcatcagtactaacaaaagacagcctcaccaagtctgtatatttgaacagaggcaagttaattcatccccccgtgtcagagccacaggcatgttgagggggttgatacgtagcactggaccagggcgcaaagcccagatagttccagccatgagaggagagcacaagaatgctctgcactctgcactcagcaccaccttgggtctgctttgcccagatgagggaccactaacaaccttctcagcacatgtgaatgtggactggttttaaaatgcattcattctgctaggattgggctggaagctggaacagtgagagtactttttctgctcctagtcatctccctttctcagcgtgacatcctcctgcagcaagcctagtatcactagcagtagttcctgcgactcttagcaacacaacccgaatatttgctccctgcatctgggtcctccaccaggatgggcctgcgcatctgcattgctgtacagacaaacaggccttttaatttacatcctcctttaattctcattaaaatcgcagggtttttgtttgaaaaaaaaaaaaaaaaaa

SEQ ID NO: 865 - DNA, 5666 bp, Homo sapiens
atgctccgagcgcggcgcccccgacgcggcgctcggctcggctcgggcatttccgcctctttgttttaaactccggacgggcttttttctcctcctcttgggggggacccagagggagcggcgccccctcccccctccggcgcggaccccgcgtgcgccttgctcgcccgcagccccgagaccgcaggcgtcacaatgtagcagggaccccaggcgtcgtgctcagaaaatggaaaaagagccagggccggaaggagggtgcagaagcgagtccgcgtgcggagccaggaggcagcgtcgcgtgggagtgctggcctgaagcctccatgccccggcagagggacggacacgcggacgtctagcggagaagccaaagatgttgaccaggaagatcaagctgtgggacatcaacgcccacatcacctgccgcctgtgcagcgggtacctcatcgacgccaccacggtgaccgagtgtctgcacaccttctgcaggagctgcctggtgaagtacctggaggagaacaacacctgccccacctgcaggattgtgatccaccagagccaccccctgcagtacatcggtcatgacagaaccatgcaagatattgtttacaaattggtaccaggcctccaagaagcggaaatgagaaagcagagggagttctatcacaaattgggcatggaggtgccgggagacatcaagggggagacctgctctgcaaaacagcacttagattcccatcggaatggtgaaaccaaagcagacgacagttcaaacaaagaggccgcggaggagaagccggaggaggacaacgactaccaccgcagcgacgagcaggtgagcatctgcctggagtgtaacagcagcaaactgcgcgggctgaagcggaagtggatccgctgctcagcccaggcgaccgtcttgcatctgaagaagttcatcgccaaaaaactcaacctttcatcctttaacgagctggacattttatgcaacgaggagatcctgggcaaggaccacacactcaagttcgtggttgtcactaggtggagattcaagaaggcgccgctcctgctgcactacagacccaagatggacttgctgtgaatggtgccacacagcgcccacagactgggccctcgcacccttgggtgctcccggccgccgcgcttaagaacattgcctctgggtgtcatgtggaccagacttctgaatagagaatatttataacttttgtatgagagagaattcacactcaacaagacactaccagcaccacgtttacagaggatgaaaacacttcacagtctcccagagccgatcgtcctctcccccgccccaccccgtgcttcagccttgcagggagagtgatgctccaggcaacacggttctgagtcaccttctgacacgagctccctctgcttgctttccaggtcttgaaaatctgaattcacttcagtttagtttatgaattttaggtttcatgataagcctcaagtgtagttggacttttattgaatccttcctaagttattgaaaaaatgtcttttcatggtgaatgacaatatttatgttgcctttagcttcttgaagatttagaagttatataaaaaattaatttaaaagcaaaccaaaagaggtttccattaacattatgatttaaccattgtatttaatttcccaccttatgaaacacaacagcagctccctgactggttcgcctttcattgtgtgaggtcggcacttggactcactcagaactgtcgctcacctgtggctgacacacccagccctggaaacggggccccagacgccacgtcgggatttctgacatgctcagcaggtagaccagaggccgtgtgaccagctcagtgctggtttacggaacaactcttacttttaaaaattacttgttcccccaaattgttgagtgccgccgtttggtttcctatgttttctttccctgttttgattttgctgaagggagaggtggtggtggttaggatcagagctctcctggcatccgtggggaggatttgctggtggtggcttcgggctcatgcccagacacactcactgccccgtctgtccaaggcctccccttcccctttgctggtgggaggagctcgtgtgctccttggccgcttactggaagggcgtttttcagagctgcagggacagggtgagcagctgaagggctaggagggaagccggcccccgctctgcagaagctgcatttcagctgaatctgtgtttcagcctcagttggttgcaccgttagcccctctcctcccggatggtcatgtttttgtcacattagagaataaacagccacacacacatttttttttttcctttaaaacagtaacttggaaatatgaaaaggccagaaggaggagcaagggctgttttctggagtggttgaggtgttgtcctgcagttgtcattgtcttctccaccgggctgttcccatttatttcctgtggaactgaatccctcctccctccactccttgggagcccaggtggtccttggccaccattcaggctttccaagaagccaaccaccttggagattttttttcttgaatttcgctgttttcttctgcttcctttagataaaaagcagctcaagagaccttatcttagggatgagaaaaacatgcatattaattccatctgagtgattgtcagtgtaaggccttttaaaacaaaagcaagttctttgttaggaattggtcaaaattcatctctttctttaagcccatcaactcccaggacggtttgagttactcagttacctaagcttgctattcatccaaatcattttctagagtcactgtataagggtctatgagtagctgtgtatgaataaatattacctgtctacctcaaaatacacatactgctgaagcattctgtacaaccgtgtgttatcacagtgcagttttaagtgtaacgttagaacttaggcattttcctgtgtggcggaataagaaaggattaaacagttacaagcctccaaattcaaataaaattaaatcacagttcagatgaaactgaatatcattgtaataatctcataatatatatttgtaactttgtagctatctttgaaatcacttgactttgcaatggtgctaagctgatagatttaaatacacagacgggcgagtggcgcccgtgtcgatgtcttcagccagtggtgaccctgcttttgtaaccgcgttaacctgacaaaacctcagcagcagaagtccctatttttctaggagttcatcgtgcagacagtcttcactacaggactcggccctggggcctctgcctctcgtctgaccttgcagccttagtcgttggaggctggagcgcaatggccctgccgtctgtggagcctctgggcggccttctttcctttctgtcaacctctcatttcacagaaaaaggctgaatttcattttttccagcatgaaagccaggatcggttagtggttggattctattggttttttttttttaaacagatggagttactgtgaagaagttttcacaactatttatgctggtaaaacaaatgctgttaaatcaccttatgcgtcgttttcaacagcagtggggctaattacccggaatacggtctcaccgatgcagttttcatggacatagaaaattcaaatagaatatataatattgaatttaagatttggggggttaaaaaagaaaacttaactttataaaattatttattctattttaagccttctatcatattttcccatccaattgtttggtttcagtggtccagctttatttacaggcatataaaatgaaattgtgagatgttttgcaagcttctttttactttgagtagcttttaatttgtatgtttttatgtggatgaagagcattttttatgcttttgtgcaataggttccaatatgcatttattagacatctgtttaaatggtaatgtagcatttattttgctaaattgaaagggaacatagatggaattccaaaatatgtacattcagctgtttggtttttcgtttttcattgttattattgtgagaatgctgttattggggttgtgtgtgagtgcccgtcagccagtgatgcctcgggccacgctgtggggccacctcagtcctgcctgggtcctggtgccttggaccccacgtgcttgtggccaggctgcccctgggcagggccatgtggcctcagaccacaagagcggagctgccctggcccaagcactgcagctgcctgcacccccgggcttcgcagccttgcttgttttctctgaacagcaacagaacagtgttcacagcgattcaaagggtggcattgggttggacgttctgggtacaagccaacctagtcccacgttgtacgtgaatgtttaatgtgctctcaaaacatggaaaataagtttagtgcacatagctaaatcacaaaacatccaatttctctgtttcctcaggaagtcattactgcgccaccacatcacatgaccttaacatgatcaatgtatttctctgccttgacatttaaatacataaattgagataagtagattagaaaatcattcaaatgataccataatttgtacgggacagggtgcgggcaatggccacgtggccaaggccctgcaggaacgcgccgaggtctccctcaccctccaggtgtccttcgcacccaacagtgcgtctgaggaacgagctgcagtttgagcgttcccctgagatgtgcgtagcctccgtgtaaatgtccactcccatggcttaattgcctatcagacgcattttcccagacgaaagcaatgttgggttggggaagacagtgcagccacccagcctttaccagcagcgtacggcagacgaaggcagtcgaggtgtggaggtgatcacgaagatacatgtgtttgactgtttaatttgaaagtttacattttttatgctttgtgttggtgtgtaatttttgtactcttggtggctagtttttgtcaaatcttttttggaatattgcttaaatgttttgattttatgatagtgaagcttgtattcagtgttttgccaattaatattatatgcttgtaataaaagcaaaagaaaagcttaagtgaaagtgtttctggctggaaatgtattacataaatcatttgtatgagcatgagagatgacttgctcatgggatgagcaatgctgtgggtattggatggaccactcaggcagcctggccgcacacacacacatgcatgctacatatgtgtacgctcagaccacatgcctgcacatatgtccacacaccagcccacggctcccttcctcaccccagccctccccactcccaggttaaccaatgtcccgatttgcttcaggcggcatttgtaaactgtcaccctgcttgcaaaccctcatttaaattggtccagcatttgctaccagagtttaggccacaaactttgtaaagctcagtttgtctccttgcagaaagaggttgctgcagtttggagctggttatgccaaggaaaatacggctaaaaaagaacttactgattcccataggtgtgtcaactgacaaatgaatgttccatctccctacgacaatttgctgcccctccccaaaaaaagcactatggccaaaatttcagtttttaaaggttaagtaaa

SEQ ID NO: 866 - DNA, 1434 bp, Homo sapiens
ggggagctatgaaccttaagattagaccactaactcgaatctaaatgagctgcccttgtctcctacaaaagaaaagttgggcaggtagggtattctaatgagggtttctctttctcttaagcaaatgatgatcaaagttaactgacaaactgtcacggaatctgccagacctcactctggccttgctgcttctctccagctcctgaacttttctttcttccatcatgctctgagcccattccttgaaaactaaaaggtccctgactcccagtctgcagccatcctgggcctgctgagctctgattcaagtgcctgcctctgccccttggtgggctgaagcttcatggaggaggagcttgccatccaacagggtcaactggagacaactctgaaggagcttcagaccctgaggaacatgcagaaggaagctattgctgctcacaaggaaaacaagctacatctgcagcaacatgtgtccatggagtttctaaagctgcatcagttcctgcacagcaaagaaaaggacattttaactgagctccgggaagaggggaaagccttgaatgaggagatggagttgaatctgagccagcttcaggagcaatgtctcttagccaaggatatgttggtgagcattcaggcaaagacggaacaacagaactccttcgactttctcaaagacatcacaactctcttacatagcttggagcaaggaatgaaggtgctggcaaccagagagcttatttccagaaagctgaacctgggccagtacaaaggtcctatccagtacatggtatggagggaaatgcaggacactctctgcccaggcctgtctccactaactctggaccctaaaacagctcacccaaatctggtgctctccaaaagccaaaccagcgtctggcatggtgacattaagaagataatgcctgatgatcctgagaggtttgactcaagtgtggctgtactgggctcaagaggcttcacctctggaaagtggtactgggaagtagaagtagcaaagaagacaaaatggacagttggagttgtcagagaatccatcattcggaagggcagctgtcctctaactcctgagcaaggattctggcttttaagactaaggaaccaaactgatctaaaggctctggatttgccttctttcagtctgacactgactaacaacctcgacaaggtgggcatatacctggattatgaaggaggacagttgtccttctacaatgctaaaaccatgactcacatttacaccttcagtaacactttcatggagaaactttatccctacttctgcccctgccttaatgatggtggagagaataaagaaccattgcacatcttacatccacagtaatgagtcataatattatacaaattcagagtgttattaaagaggtattgaaatatttaaaaaaaaaa

SEQ ID NO: 867 - DNA, 2947 bp, Homo sapiens
atggggggcggagccgaggcctccgaagcggaagtgggttgctgttgaggcggcggcatctttctcgaggagctctcctgggcggctgaagaaggagcttcttctccggagtgcgccggcggtggcgcctgcggacctaactagctccaggttaggccgagctttgcgggaaagcagcggacttgaaaatactggaaatctgtccggatccaaattattttgcaagccagatgagtaaccagagggcatgaaaggttgagaacatttgacttccctgcaaaccttggtatagatcacttccttttctgtaggaaaggaaaggcaccaaagagcacaatgagtacaagaaagcgtcgtggtggagcaataaattctagacaagctcagaagcgaactcgggaagcaacctccacccccgagatctccttggaagcagaacccatagaactcgtggaaactgctggagatgaaattgtggacctcacttgtgaatctttagagcctgtggtggttgatctgactcacaatgactctgttgtgattgttgacgaaagaagaagaccaaggaggaatgctaggaggctgccccaggaccatgctgacagctgtgtggtgagcagtgacgatgaggagttgtccagggacagagacgtatatgtgactacccatactcccagaaacgccagggatgagggcgctacaggcctcaggccctcaggtactgtcagttgtcccatctgcatggacggatactcagagatcgtgcagaatggacgtctcatcgtttccacagaatgcggccatgtcttctgtagccagtgcctccgtgattccctgaagaatgctaatacttgcccaacttgtaggaaaaagatcaaccacaaacggtaccaccccatttatatatgaagtattcagagccccccaggagagacggatggacagacagacagccaggttctccagtggtatctgcctccattttcctgagatcaaaaagactgtttcgaaaccaacatctgatatgtaaactgctcttttgtttccaaccccttccttttgttatctccagtttgatgctatggcgctggacccagggccctcccaggccatctctgttcctctggggtggtccagttctagagtgggagaaagggagtcaggcgcattgggaatcgtggttccagtctggttgcagaatctgcacatttgccaagaaattttccctgtttggaaagtttgccccagctttcccgggcacaccaccttttgtcccaagtgtctgccggtcgaccaatctgcctgccacacattgaccaagccagacccggttcacccagctcgaggatcccaggttgaagagtggccccttgaggccctggaaagaccaatcactggacttcttcccttgagagtcagaggtcacccgtgattctgcctgcaccttatcattgatctgcagtgatttctgcaaatcaagagaaactctgcagggcactcccctgtttcctaagaacgaaaaagtgcaataaaggccattcgttacctacttttcagcagcccacaagatgtagcactattagtgtccccctcagaggcttaatgttgcctgtggagcagtgcccatcccagcccgtttctgcccaccagttgttctcaggaaccttacccatgctccagcgtccttcacctggcacaggacatgcaagataaatagggcaggcacgtgtttgggtgtcctctcttttctgataaaatccatcccgtgtttgccacacgccctccagtcctcagttcccactgcctaacgtctgcccccgtgtagatactgagaggtggtggcagtaattgtggccttatcagccgctcagttccaggcttttgcccaggtcactgttgccccatgttcggagaacctggcccacctgtcttggctttctcatccttcccaacccagtgccgtttatttcagaagcttcctggccactgggcttggatgcttcgggcttctgactgctccataggttttgactggtgaaacaggggcccagatgacaacctctccttcgctccacaggtacgcgggagcctcaggttctctcaggggcagcaaagtggcccaagctgcccctgacagcacagggcctggggggtggctaacgagagaggccttacagtgccggcatgcctcctcttccactgtcgtccttcctcagagggcctcacgccaaacaaacggccttttcgtgtgaaacatcttcagggcgggaaaggggccacttctggctttgttagcaataactgaccttcagtttacccttctgaaggagcagggactcagcacagaattcactttagacggggctgaaggagtgtccctcctctatgtgaaaagaaaattgttttattcttcattctgactttttaactgtttggctcacttccagttagtttgaatgaaaataataattttctacttggagttgaagagggcagaatccgcagctctcatcattgtgatgtgtagcatgtctgccctctgactggacatcattgccattaactttcttctgggcatcacggcaatgtcacgatgcccagacttggagcaaggcaaccttggagtcagtccactcataaaatatggtaacacccattttaaaatttaagttttgtccttaaagacaacttcagtggttaattataaaagttgtgttacttcgtcctaaattaaattgatagaaagatttaaaaatgtgttttgtttctactattcagaaactgcgaactagggaaaggttggtatgaagaaatgtctttccttttttcaatgtacatagttcaactctttctttgttacatttaaactatatccatggatatcagtctgctttggactcctctgctagtgttacagatggaaataaaaccattaatttgaaccaaa

SEQ ID NO: 868 - DNA, 5639 bp, Homo sapiens
cttgcgcaggcgtagtgctcctgcttcctggccgagggcgggcgagcggagcctgctttcgcagcgatcgcgagcgtgtggcgattgcttctgtctgttatttagatatggaagctgaggggatgcacagaggcagccagaacctaggtcagggtctcgctcggtgctgaccgcccccggggtcgagtaggcgatgggggagcccggcttcttcgtcacaggagaccgcgccggtggccggagctggtgcctgcggcgggtggggatgagcgccgggtggctgctgctggaagatgggtgcgaggtgactgtaggacgaggatttggtgtcacataccaactggtatcaaaaatctgccccctgatgatttctcgaaaccactgtgttttgaagcagaatcctgagggccaatggacaattatggacaacaagagtctaaatggtgtttggctgaacagagcgcgtctggaacctttaagggtctattccattcatcagggagactacatccaacttggagtgcctctggaaaataaggagaatgcggagtatgaatatgaagttactgaagaagactgggagacaatatatccttgtctttccccaaagaatgaccaaatgatagaaaaaaataaggaattgagaactaaaaggaaattcagtttggatgaattagcaggtcctggagctgaaggcccctcaaatttgaaatccaaaataaataaagtgtcttgtgaatctggtcagccagtgaaatcacaggggaaaggtgaagtggccagtacaccctctgacaatttggatcctaagttgactgcccttgagccaagtaagaccacaggggctcccatttaccctggcttccccaaagtcacagaggttcatcatgagcagaaagcctcaaactcttcagcatctcagagaagcttacagatgtttaaggtgaccatgtccaggattctgaggctcaaaatacagatgcaggaaaaacatgaagccgttatgaatgtgaaaaagcagacccaaaaggggaactcaaagaaagttgtgcaaatggagcaggaacttcaggacttacagtcccagctgtgtgcagagcaggctcagcagcaggcaagagtggagcaactagagaagactttccaggaagaggaacagcatcttcagggtttggagatagcccaaggagaaaaggacctgaagcaacagctggcccaggctctgcaggagcattgggctctaatggaagagctaaatcgcagcaagaaggactttgaagcaatcattcaagccaagaacaaagaattagagcagaccaaggaagagaaggagaagatgcaagcacagaaggaagaagttcttagccacatgaatgatgtgctagagaatgagctccaatgtattatttgttcagaatacttcattgaggctgtcaccttgaactgtgcccacagtttctgctcctactgtatcaatgaatggatgaagcggaagatagaatgccccatttgtcggaaggacattaagtccaaaacgtactctttggttctggacaattgcattaataagatggtaaataatctgagctcagaagtgaaagaacgacgaattgttctcattagggaacgaaaagcaaagagattgttctgaagaccgtgctctaagggcatttgaaagactgccaggtagtgcgagcctgagatggtctggaggattctctctagccgtgactccgctgctctgaaggtcaactgagaagtcttgtgggacagagacttgagttaggaagccctcagtcacttgccttccacggtggccagccctgctgccatcattggctgaagcaccaccaggattcacggcacccaactgcttcagggtacttcgtagactctgcctcactacatgtcgaaagagttatttgagttctcttctgtttttttttaatttgttgttgttgttactgttttgatacctcggaaacacctccgttgacagttgttttggataggttgggtgtaccccatggctgcctctgaaggcagtgtctattttgagaggatggcttacctcttctttgtgaaaatactatctcatttcctggaaataaaatgtaaaacctgtcagttgctcagctgggctttggtgtatttaccttccttcccttcctgctcccagacagtctcacaagtaaacaccagcagctcatagattacaaccaagaaagtgactgtatcagatgatagacttcaagtgaatgtcagcctaagaggccaagctgcagatcgtggcaacagatgagctctgttaacctcctgactgtcgtgtttcctttttattacagaggtgggtcactgtttaccttgtttcaggggtgggagaaactcctttccttcagctggcatttgaatgtttccaaatctattttatctgacgtcatgaacacacaggcaatgattttatgacaacttgatgtgcttttttctttatttttcttttacattagaagttttctctcttttctccacctctcctttatttttaattttaattttaatttttgaaacaagatctgactctgttgcccaagctggagtacagtagtgcaatctcagctcactgcaacctccacctcccagactcaagccatcctcccacctcaacctcccaagtagctgggactacaggcatatgccatcacacccagctaatttttgtttttctgtagagacagggtttcaccatgttggccaggctggtctcaaattcctgaccttaagtgatccacctgcctaggcctctaaaatgctgggattacaggcgtgagccaccacgcccagcctataccccatgtattttcataaagggttggaaactattgattgccaactttttaaggatggtagggattttttctttgttgaatatactgtgaattttgggattctggagtccttagtcttcatttccattcttctgcccatgattactgatcaaaatactggtagagtcatggaggaagtaagttaaatgtggaaaaaatgctttaaaagtacttactataaccacatcataagaattctggaaaaatagagaacaaaaggaaaagattgttaccaccttgatttaataacttcttgtttccccatacatgtgttttgtttatagattgcatgggtatatgtcaatttttatatgttctgtgtttagtttacatattgtaattcatttttaagagagtacagacatacactttttgagtaggcaatatgttcacatagtttgaaattaaaggtacaaaatggcgtagaatgaaatgcctctcaccctttccccacagcgactacttcccactcagaggcaacaagtattacagttgcttgtatattcttccagagatctctgtctatacaagcaaaaacacatgtggtctttttccttgctttgcacaaatggtaaactgtacgctattctgaaccttgcttttttcagatatatgttggcaacagttccatgtcagtacatagtttcctttctttattacagctgcctgttttttcattgtgtatttgcaccatcatttacttttctggcttacttttgatagaaatctaggttggttcaaacctttttactcttaaaacaatgctgcagttaacacccttgtacatatatctttagagagaagatattttaaaaagaaatacctttttaaaaattattttattattttttaatagagactatgttgcctaggctggtcttgaaattctgggctaaagcaatcctaccaccttggcctcccaaagtgctgagattacaggcatgagccattgcacctggccaagaagagacatcttgacttgagcctgaagactatgtacagagactgacctcacagactgaccattccatcccacagctgctggacatagagtgatttgcagcccctcctttcagagtaccacatccctctcaagtgttccacaacatctaggaaagtgagctcttaaagacagactaaaaagagtaataaatcaatacaacaacattaaaagccagactagcggagtttgaatcttggccctgctgttagtaactgtgtgagccttgggcaagttactcagcctccttgtgtcttggttttggtttcttcatctctaagtaattatatctgtcattattgccctgatcacaaacaaaagcctgaatgtactatgtttaaaagacaaaccaaaaattaacccaaacttgcattatttgtctgagctacagaatgttctttccttggagagatatctgatattaaacatcatctgcattttacttgcctagaaaatacacggtaacttttctgccttgcagcatcaaactatagtacagctgagccccagtgctgtgcagtctgactctaattaaaggcaccttctttacagcagggctctggggaactggaaaagggggtttgtttcattatctggttttattaagcagatgaatgcagccagctatatgaagcactttgcagtgaatggcaggtgtcccatatctggttatgttaacctagaaagggctcactctacctctaggcatgtttcatcccaacaatcagactgtgccaaagcaggggactttgtcctttgtggattgcatagctggatacccatcatctgtttctctgattggaagctgctgttgtacagaaagacctgcatttcccccttgtctccagttctctcactactttttcctcctctgtgagtgaccatccaggcagtcaccataactgctggagtgtctgggattggtagctctctccaactgcctgcttgctctttacagcctctctctgtgactggaatctctccacctcatcgtatctaaggataacccagaaacatggggtgtcctaggtatgtttatctcgacactgaaccccctaggcttctgatgaatccagtgattagctaaatttgacatagaaagtaagaaggaatgtctactttgtattgtggtcctaatctaagatcaggagaatcctggaattgttatctgtctcttgctctgagatacagacttgttcataggtgtggggcctgattggaacaggatctgccattggtcacaataggtcaagggcttgttctgaaccctagttagcttcattcagagaaagaaacttcctacctggtcagctttttcagcttctccaacaaatgggagttgaggcagtaggagtgtggggttcttgggaagacgatggggccttgtattaaggagaaataatgaactatcttcttgattcttccattgagaaaagcatatgaatcctaggaaagggctcagcctgtgataggcattcaataaatactccaatgctgtcattcctttgtctacagcatccccaaacaatgtaccagtgatgggctacctgagctcatctagtcgccaagcagtatctcctgcttgctgctgctttactacattccagatgcccacctcatccaatttccagagccactatctctgctgtccactttccttcaggctctgtgaatacttcaacctgctgtgatttggggccgtttgtactctgcatgtattcaataaattcaattcagcaatagttaaaaaaaaa

SEQ ID NO: 869 - DNA, 10828 bp, Homo sapiens
ggtaccatagagttgctctgaaaacagaagatagagggagtctcggagctcgccatctccagcgatctctacattgggaaaaaacatggagtcagctccggcagcccccgaccccgccgccagcgagccaggcagcagcggcgcggacgcggccgccggctccagggagaccccgctgaaccaggaatccgcccgcaagagcgagccgcctgccccggtgcgcagacagagctattccagcaccagcagaggtatctcagtaacgaagaagacacatacatctcaaattgaaattattccatgcaagatctgtggagacaaatcatcaggaatccattatggtgtcattacatgtgaaggctgcaagggctttttcaggagaagtcagcaaagcaatgccacctactcctgtcctcgtcagaagaactgtttgattgatcgaaccagtagaaaccgctgccaacactgtcgattacagaaatgccttgccgtagggatgtctcgagatgctgtaaaatttggccgaatgtcaaaaaagcagagagacagcttgtatgcagaagtacagaaacaccggatgcagcagcagcagcgcgaccaccagcagcagcctggagaggctgagccgctgacgcccacctacaacatctcggccaacgggctgacggaacttcacgacgacctcagtaactacattgacgggcacacccctgaggggagtaaggcagactccgccgtcagcagcttctacctggacatacagccttccccagaccagtcaggtcttgatatcaatggaatcaaaccagaaccaatatgtgactacacaccagcatcaggcttctttccctactgttcgttcaccaacggcgagacttccccaactgtgtccatggcagaattagaacaccttgcacagaatatatctaaatcgcatctggaaacctgccaatacttgagagaagagctccagcagataacgtggcagacctttttacaggaagaaattgagaactatcaaaacaagcagcgggaggtgatgtggcaattgtgtgccatcaaaattacagaagctatacagtatgtggtggagtttgccaaacgcattgatggatttatggaactgtgtcaaaatgatcaaattgtgcttctaaaagcaggttctctagaggtggtgtttatcagaatgtgccgtgcctttgactctcagaacaacaccgtgtactttgatgggaagtatgccagccccgacgtcttcaaatccttaggttgtgaagactttattagctttgtgtttgaatttggaaagagtttatgttctatgcacctgactgaagatgaaattgcattattttctgcatttgtactgatgtcagcagatcgctcatggctgcaagaaaaggtaaaaattgaaaaactgcaacagaaaattcagctagctcttcaacacgtcctacagaagaatcaccgagaagatggaatactaacaaagttaatatgcaaggtgtctacattaagagccttatgtggacgacatacagaaaagctaatggcatttaaagcaatatacccagacattgtgcgacttcattttcctccattatacaaggagttgttcacttcagaatttgagccagcaatgcaaattgatgggtaaatgttatcacctaagcacttctagaatgtctgaagtacaaacatgaaaaacaaacaaaaaaattaaccgagacactttatatggccctgcacagacctggagcgccacacactgcacatcttttggtgatcggggtcaggcaaaggaggggaaacaatgaaaacaaataaaagttgaacttgtttttctcatgcatatgatttccattatgcctacagatatggaccctttttctgtcttgacttcttgatcattgacctctgtttacaacaggaggagggtactaaagtcggaggatttccttttcttgtagctcactgcccacagactttctacagagtcaccaatctgtcagtaacaacagagagtccagcaataatcggtgactggtgtgcatagcggaggttgcggcattactttgcacaactagctctttgtttcatgaaggaagtttttattttttcaccgattattgccagtccgcaggatggcatgaaaagggtccatagcagtagcaacaatagcattataatatattacagggtaaatgggcatgaagactatatatagctaaaagagatattgtttatatattgttttaagtaatataaaatgtagttactggtgtagcttttcctgttgaattgataaggcactttcattttgcacctttttctttaaattaaatgctagcgtgttcactgtcgtgtcgcatgtgcaccagaaacacaagtttaactgagaaggcttggaaggtacgttgggaggtatttatgctgctgtttacaaaattatttttaagagactggctggtcatatctagaaatcaccacgttggattttttttttaacatgtgaatttggaattagaaacggaactctccctaaattatactttgctttttggtaagtttaatgatagatgtgtttatgcttcatacaaagttgaatgattgattggcgtggtggacatataccatcatgctcattttttttttttaaagctttttaaaatgccacctcatggaggcgagggggaggagaagctcattttacacaattcagtagttaaatatggactcggtctcaacttggaattcttatgctttgagaacaaatcaacaaccagaatatttattggaatctagcttttattataagaaggacccaaagattatatcctgagcaaatgcacactccccatgtgaggacatgaagtatttactttgtgaatgtttatgttcttggtataatctaggaaccctatgagtttatctcagagtgaactaattctagatttgttgtcaatagatgctataattcaagaatgttgctctccatatttgaaaaacgatggataggagggtgagggaagcatacaatgttgaaccagtttctcttatttaaatattaaatactttaagcctttaaagtgaagttgatgctagctgcaaacatttactcttgtatttatcttcactaggaaactgtggactgtaatttattttattaaatatttagaagattatttggcttgtgtgttcaggtgagaaatactgagttgtttttgtttaatttcatggtttttttttttttaatgatccctagtgggggaaggggaaaggaatagtctgataaacagatgtgcatattttaaaaacaagtgaccttttgggaatgtaggcatttagacgatgattttagtcgcactaggggtgggattcaaactactggtcaaagaccattttgtacagaaaagggaacatctccgatgggtgttaaggtaggagtttccatgcagccctttatgtctgagaaatagtctcctctgccattggggtccctgcggaatcttctacaggaattgcagctcttcacgtcatgctaggttaccagcatgggcttcccagagcacttcactctgtttctaactccactgacttttctgacttgtttcttgagggacttggaaaaggggaaggtattattcacacagatgtgtgtatgaagcctaaataacatccaactttttttccaaaaacatagtaagagtttaaccataaatagaagagtaatattcctttaaatttcttacaggcatgtaaaattttatgtgtttatagagagatgctaactgtcagcatatagtatttatattggggcaagaagggttaaatcaaatctttaatttaagtaagcatagttcctttaaagatcagtagtatttatactctgaaaagagtaccaagcttagttcagttatttattcatccattttttttctattgtttctcctctggggggaaatggtgttttgtttttgtttgagttttgtgttttagttttttggttttggttttgttttgtttttttgtcattcagattcactaaatttggggatggttttattaaagtatattaacttctttttaaccaaagctttctgaatatgaccagcctcaggtgctagcgcattaaagagcaactaaacctaattccagtgtcgatttgtgaaataataaaagctaattgaatttctctaagggtgagagagaacataatgatgaacttaaaaagaaattccttttcccagaagggattctgcatgtacctacaaacaatcatgctctaaccacagtaatagtcatgccatggtgacattgcttttacggtaaaccaagataggtaatatgatgcttcttcccaggtgtttctgaaagaaaagcagcggtggagcttaagagccaagtccactgattgacataataggatggaattgtagacagagacatgctccatgaaacaaggaaacaactgactactatttggatctaagttgggatctgatgttaaacaataaattcagtttaaaaaaaatatggagctcagaaaaggatgtgaaaaactttgcattttcctttcttcattattacaaaaacacctatgtgatgacataaaatacttgggtgatatcagaacaattatccttaatagtttttataattaaagtttcctaaacttcagtctccaatagtcttttaaggattggaaccacatcactgtcagccccgctgctacaatgcctttgtacaatttttttacataaggcaaataaggcttttgtacaaagcctgaataccttctgttccaatggtgtccaaatggttattatattgtgaaaaacctggccttggtcacaatgcaaacaaaagtacagatgaaagtgctttttggacagtttgcaaattgtgttaaagctacggattttttttaaagtgttcagcatcttaacgtgtattaaagctatggatttttttttaaagtcttcagcatcctaattcaccctttctaacttaagaaaaacatgacttaagacactgcttctaagtttggttgttctttatagtgtggatacccagttatctgtgagcgtatgggggtgggctgagggtcaggtgaggaaggagtgtgtgtgtgtgtgtgtgtgtgtgtgtgtgtgtgtgtgatttgcatgtgtatgatgtgtgtgcgtcggaccgcttctaggctactaagtgtcaatggaaaagaaaatgtattcaaaatacttaaatcaaaactagaagatggggaaaaaaagatttattctatacaaagccttgtctggaccactttagagagacttctatttttttaacccttctataaatatttgatggcacttgaaatattcctgcaataaaatgtgatttgtgtaaagaaaaaaagattttgtaatgtgaaacaaagaaagaaagtaatgtaattttctaaaaaaaaaaatacaaacaaacaaactttgtattattttcttgatggaatttgtctatctgtctttggaaaactttttatttcattgaatgtgccatagtagaaatgtgtgtttttagttttagactaaggaatagctagttgttgtgttccgacattccaaaatgcaaaacaacctagtagtatctttcatgaaaaggtttaagtagtatgtaagcttctctcattgttgcttttttgcacatgttcttcattcctctctagtgcaatatgtacatagagcacttgcgggtgtaccttgatccctcagggaaaaatacatatttgtacagttttttggggtttttttgttttttggttttttttgttttgccttttgtttttggctaaggaatgtcgatcgaatcacttgttattgttgaggggcagccagataataatcctaaagccactgtttccaacattgattgtttaaatcatatgtccttccaatgctattattttaagataataataaaaagttattttctgacagttctttgtgctgactggtgaaaaacaagggtaaataagcaccttataattgacttactgtgaatgacaatccatcttggtatcaacgatagaagccctatcattttggagttggggttaagagtcagaaacaatgtgctcagggatctcctaaaactcttaaaacagggtggccagtactactgggacaaattgtgttttttattattaataataatgataataatactatccctccaaggcacaagtgaactatatagaactgcgtgtgtgtaaactctttactctcgtctcattttgttgagtttagaacttgatgtgctcgtcagtcttgtgtttcaaaacactgaataacttccaaagcaaagttatgccagtgtgttcaaaagataaattaataatgtaccagcaaagagcatcattcaaagtatagtccttgcatattccagttaccatttctctaataattaaaatattcatgataaatatatatatagcatcatatgttaaaaactatttcaaattctacatattaaggatgaaaattttaaaatccagtaataagaggagagacctgcctatcagtacagtgatataggtaaaagatgaaatatgtttttaaaataccagcaattaactattgttttcatgggttctcctctagaagcaaaccaaaaattccttcatggaaaacaattcttacttctacatgtgtagtttatatctgatgcattacaagagctaatgtttaaagacaaaacaaaacctgcctgtatgacagcagcaactcgagccaacatttagtgttacatgttatatttttgaaataccgttttgttatcatattccacatattactttccataaagtcagagaagttcaatgtaattgttggctctgattcttccaccttgggatacacattcacaagaagatttatatattttcttactatgatagaggaacataatctgggaaaacttcccatgtctgtaagatgaaaaggatacctttaccatgttgtttttgataataaagaatatggaaaatggtagaaatctctcctctctatgtgtatttgtatatgtgtgtatacacacacacgttgacatttttacataacatgtgattgccacttcttataaagttatgatatagaaccccatgaaaacaactttatattatagatcaaataatgtgcccagaaacgcaattgcaacagtaaatcttgatctattggtaagagtctatgatacaggtcttcattctatccctaaacataatgttagtaaagaggttccatcagattgtattatagagaccttcctattgctatttatttttaagagatgagaagactgactagcaatgtctccacagtgcaattggtttcacttctgggtctgtctgtctgtttgtgtaggtgagatcagtgttgtcaggctctcagaataatttttaaaagaatccagaagcctgacttcacaccaagtagccatcctagatgggcgggggggatctccatgttcaaccaaaccctcagaacttagagcaataaatacattcagtcatttatttataaatgaatgacagaatattcaatccaaatagaaacaaccttttgtcagtgatgcaacataacatggagtcttatattgagaaagtgaatatgaatattttaaatagatgcctaggaaatctgtgtttgctgtttacatttaatgtactttgccacattagcagtaccacacttcttttactttcatccttctaagaactaatgaaagatagcttgctattagctttgacatgttgcacatgccattatgttgttctctaagaacaactaaattctctccagtgttcatgtgtgattcctttttcatcattattactttaatgtggatgaatactatttctaggaacttgattatcactgaacagattgcatatgtaaatgcagataattcttgagcaatatagtgaaaatgatttcacaaaaaaaatccatatgtactgtatacatcttcctgaatccaaaattctcctgttatccacacagtttgaaatctcatattaaacagtggtaaatttttaaacattaggacattagctggctgcttctataaatgtacctgtattgtctgcctgctccttttgtggagatgtgtttttgtattggatgtttgggccaatgggaggcttcaagctacaacatattttcccactttaaataatatttaacatatgacaaaccccagacaaggcttttaatatgtataaagaactgcagtgttaggtggtttatttgcaaactgttttcagtgttgtccatttttatggcacctttaacaatattcttgtttccaaagtacaaaaaaaataggttaaataatctagccataactgaatgtcaagcaataaaacaaatgacttttgtgcatagacttaaaaaatacaaattttagacatctgcatgtaaatgcaatctcttgtttactgctttcttcaacttgagcaatcgattccttatttactattaacttaagaacttgtaacggcctgtaaacattttctctcttactcttctttcaaatttacctgtccctgcttttgagtcataatatttaatgttgttctgcacatctctatacagttaactttttggctttcattctgtatagataagaaaatgttatattataaacagcctactcagtgcaaatatttatctgtttatcaaatccacaatatgctgtataataccggttttactatataatctattttagacatagctgtttagaactagagtgtgctatttttgtgtttttctgatgtgtggtgctagacaagttacttttgtgaacaacaaaaattatcccttttattcctagacaataccacctttgggtcttgttaatttcactgagtataactatatatttgtatatatatacatatatatatatatctacctatgcccaactggcagctgtatcagagtgctggatttgggacatgcttttctctttaaatacataatatcattatataaattattctagagtgtatttaattaggataaaattacttccttagtatggatatttgacatctatagggtgaatttgtttataaatatggctatatggaaacttattagcatttactttatgtttgctacttggctttacagcatatctcctaagctgaaaaataatttgccaggccttcaagatcctaaagaaacttgtttaatggagtaatatacttttttttcttattaaggaattgtattactggcacctaacacagttgtattcttagctcctattatagataatgggcatttacataaaatatcctagatggcttgatggcagaataaacctttcccctcctacctgagtcatgagaaggatggagacgtcctctgccataacatgggccataaagcaaattcgacatgggatgttctgtttcagtatgacctcaaccagttccatgaactgagtgaaggaccttcattttcaaagttatttaataagtagcttaattaagcctttctacccattctcccaagatctactggcattattgaaaagcaaagtttatcaaatatctaactaaggatgtagttaaccttattaaatattgattagaattgttctgtaatattactgaatttgtaagatctttagcaaagatttttgagcaatttataaatgtagagcaaatgtttctgtttactgcactttttgtaactgaaggtgataaattctcaagccatgattattggcttccatgcactgcaatatttatccacaattctagacattttccatttttgtggaagagttgctgttaccttaattataaatgcaattgtgtggttaatgagagctaatgctagtagttaaccttttaaagtggattggctacagttgagggagaaatctcttttaatataaatcacatcattccttaactgcctctcttggaaagagattgaaaccttttttttaaagcacgatttagcatcctaagcttcctgagggtagagattgtatctttttgcgtctgcacaatggctagcacatgtcagcatttgacaattgttaaatgataacaagtgtgccccaattaaaacgtttttcctgggttgttttgttaaatttacaaagtaagccaagccttacggttaacattctcctctacaaccaagtattaaagccacatttaaaaagaccacatgaaatgctgattctaattgtgtgtaggtcttgaggattaagcacacaaatttcacaaacttctgtttgagtaaacaaactcagccttctgtaaatatacatgcaagtttggaaacagtaatactgtacctataaatatatgctgtctgttttgtgtacagtatgtaaaaactccttttctgccacactaaaaatgcaagccatttatgggaatcctaaaactagtattgaactaaaactttgctaatgatctttattagaggatcgtccaacttttcacttaccttgggttttcttttcaattcactcttacactagtctgcttatttccagctgtttattttattgagtcctgaatttaaaaaaaaaatattttgattcattttgtaaatacaagctgtacaaaaaagagagatttaatgttgtcttttaaatactccaattttcattctaatatgaatgttgttatattgtacttagaaactgtacctttaatattacattacctttattaaaagtgcattgaacacatcaattttagatgtgctttatgtactgttatcctataataaaacttcagcttctaatggaa

SEQ ID NO: 870 - DNA, 5967 bp, Homo sapiens
ctttgggcctcataaacaaccacagaaccacaagttgggtagcctggcagtgtcagaagtctgaacccagcatagtggtcagcaggcaggacgaatcacactgaatgcaaaccacagggtttcgcagcgtggtaaaagaaatcattgagtcccccgccttcagaagagggtgcattttcaggaggaagcgatggcttcagacagcatatttgagtcatttccttcgtacccacagtgcttcatgagagaatgcatacttggaatgaatccttctagagacgtccacgatgccagcacgagccgccgcttcacgccgccttccaccgcgctgagcccaggcaagatgagcgaggcgttgccgctgggcgccccggacgccggcgctgccctggccggcaagctgaggagcggcgaccgcagcatggtggaggtgctggccgaccacccgggcgagctggtgcgcaccgacagccccaacttcctctgctccgtgctgcctacgcactggcgctgcaacaagaccctgcccatcgctttcaaggtggtggccctaggggatgttccagatggcactctggtcactgtgatggctggcaatgatgaaaactactcggctgagctgagaaatgctaccgcagccatgaagaaccaggttgcaagatttaatgacctcaggtttgtcggtcgaagtggaagagggaaaagcttcactctgaccatcactgtcttcacaaacccaccgcaagtcgccacctaccacagagccatcaaaatcacagtggatgggccccgagaacctcgaagacatcggcagaaactagatgatcagaccaagcccgggagcttgtccttttccgagcggctcagtgaactggagcagctgcggcgcacagccatgagggtcagcccacaccacccagcccccacgcccaaccctcgtgcctccctgaaccactccactgcctttaaccctcagcctcagagtcagatgcaggatacaaggcagatccaaccatccccaccgtggtcctacgatcagtcctaccaatacctgggatccattgcctctccttctgtgcacccagcaacgcccatttcacctggacgtgccagcggcatgacaaccctctctgcagaactttccagtcgactctcaacggcacccgacctgacagcgttcagcgacccgcgccagttccccgcgctgccctccatctccgacccccgcatgcactatccaggcgccttcacctactccccgacgccggtcacctcgggcatcggcatcggcatgtcggccatgggctcggccacgcgctaccacacctacctgccgccgccctaccccggctcgtcgcaagcgcagggaggcccgttccaagccagctcgccctcctaccacctgtactacggcgcctcggccggctcctaccagttctccatggtgggcggcgagcgctcgccgccgcgcatcctgccgccctgcaccaacgcctccaccggctccgcgctgctcaaccccagcctcccgaaccagagcgacgtggtggaggccgagggcagccacagcaactcccccaccaacatggcgccctccgcgcgcctggaggaggccgtgtggaggccctactgaggcgccaggcctggcccggctgggccccgcgggccgccgccttcgcctccgggcgcgcgggcctcctgttcgcgacaagcccgccgggatcccgggccctgggcccggccaccgtcctggggccgagggcgcccgacggccaggatctcgctgtaggtcaggcccgcgcagcctcctgcgcccagaagcccacgccgccgccgtctgctggcgccccggccctcgcggaggtgtccgaggcgacgcacctcgagggtgtccgccggccccagcacccaggggacgcgctggaaagcaaacaggaagattcccggagggaaactgtgaatgcttctgatttagcaatgctgtgaataaaaagaaagattttatacccttgacttaactttttaaccaagttgtttattccaaagagtgtggaattttggttggggtggggggagaggagggatgcaactcgccctgtttggcatctaattcttatttttaatttttccgcaccttatcaattgcaaaatgcgtatttgcatttgggtggtttttatttttatatacgtttatataaatatatataaattgagcttgcttctttcttgctttgaccatggaaagaaatatgattcccttttctttaagttttatttaacttttcttttggacttttgggtagttgtttttttttgttttgttttgtttttttgagaaacagctacagctttgggtcatttttaactactgtattcccacaaggaatccccagatatttatgtatcttgatgttcagacatttatgtgttgataattttttaattatttaaatgtacttatattaagaaaaatatcaagtactacattttcttttgttcttgatagtagccaaagttaaatgtatcacattgaagaaggctagaaaaaaagaatgagtaatgtgatcgcttggttatccagaagtattgtttacattaaactccctttcatgttaatcaaacaagtgagtagctcacgcagcaacgtttttaataggatttttagacactgagggtcactccaaggatcagaagtatggaattttctgccaggctcaacaagggtctcatatctaacttcctccttaaaacagagaaggtcaatctagttccagagggttgaggcaggtgccaataattacatctttggagaggatttgatttctgcccagggatttgctcaccccaaggtcatctgataatttcacagatgctgtgtaacagaacacagccaaagtaaactgtgtaggggagccacatttacataggaaccaaatcaatgaatttaggggttacgattatagcaatttaagggcccaccagaagcaggcctcgaggagtcaatttgcctctgtgtgcctcagtggagacaagtgggaaaacatggtcccacctgtgcgagaccccctgtcctgtgctgctcactcaacaacatctttgtgttgctttcaccaggctgagaccctaccctatggggtatatgggcttttacctgtgcaccagtgtgacaggaaagattcatgtcactactgtccgtggctacaattcaaaggtatccaatgtcgctgtaaattttatggcactatttttattggaggatttggtcagaatgcagttgttgtacaactcataaatactaactgctgattttgacacatgtgtgctccaaatgatctggtggttatttaacgtacctcttaaaattcgttgaaacgatttcaggtcaactctgaagagtatttgaaagcaggacttcagaacagtgtttgatttttattttataaatttaagcattcaaattaggcaaatctttggctgcaggcagcaaaaacagctggacttatttaaaacaacttgtttttgagttttcttatatatatattgattatttgttttacacacatgcagtagcactttggtaagagttaaagagtaaagcagcttatgttgtcaggtcgttcttatctagagaagagctatagcagatctcggacaaactcagaatatattcactttcatttttgacaggattccctccacaactcagtttcatatattattccgtattacatttttgcagctaaattaccataaaatgtcagcaaatgtaaaaatttaatttctgaaaagcaccattagcccatttcccccaaattaaacgtaaatgttttttttcagcacatgttaccatgtctgacctgcaaaaatgctggagaaaaatgaaggaaaaaattatgtttttcagtttaattctgttaactgaagatattccaactcaaaaccagcctcatgctctgattagataatcttttacattgaacctttactctcaaagccatgtgtggagggggcttgtcactattgtaggctcactggattggtcatttagagtttcacagactcttaccagcatatatagtatttaattgtttcaaaaaaaatcaaactgtagttgttttggcgataggtctcacgcaacacatttttgtatgtgtgtgtgtgtgcgtgtgtgtgtgtgtgtgtgaaaaattgcattcattgacttcaggtagattaaggtatctttttattcattgccctcaggaaagttaaggtatcaatgagacccttaagccaatcatgtaataactgcatgtgtctggtccaggagaagtattgaataagccatttctactgcttactcatgtccctatttatgatttcaacatggatacatatttcagttctttctttttctcactatctgaaaatacatttccctccctctcttccccccaatatctccctttttttctctcttcctctatcttccaaaccccactttctccctcctccttttcctgtgttctcttaagcagatagcacatacccccacccagtaccaaatttcagaacacaagaaggtccagttcttcccccttcacataaaggaacatggtttgtcagcctttctcctgtttatgggtttcttccagcagaacagagacattgccaaccatattggatctgcttgctgtccaaaccagcaaactttcctgggcaaatcacaatcagtgagtaaatagacagcctttctgctgccttgggtttctgtgcagataaacagaaatgctctgattagaaaggaaatgaatggttccactcaaatgtcctgcaatttaggattgcagatttctgccttgaaatacctgtttctttgggacattccgtcctgatgatttttatttttgttggtttttatttttggggggaatgacatgtttgggtcttttatacatgaaaatttgtttgacaataatctcacaaaacatattttacatctgaacaaaatgcctttttgtttaccgtagcgtatacatttgttttgggatttttgtgtgtttgttgggaattttgtttttagccaggtcagtattgatgaggctgatcatttggctctttttttccttccagaagagttgcatcaacaaagttaattgtatttatgtatgtaaatagattttaagcttcattataaaatattgttaatgcctataactttttttcaatttttttgtgtgtgtttctaaggactttttcttaggtttgctaaatactgtagggaaaaaaatgcttctttctactttgtttattttagactttaaaatgagctacttcttattcacttttgtaaacagctaatagcatggttccaattttttttaagttcactttttttgttctaggggaaatgaatgtgcaaaaaaagaaaaagaactgttggttatttgtgttattctggatgtataaaaatcaatggaaaaaaataaactttcaaattgaaatgacggtataacacatctactgaaaaagcaacgggaaatgtggtcctatttaagccagcccccacctagggtctatttgtgtggcagttattgggtttggtcacaaaacatcctgaaaattcgtgcgtgggcttctttctccctggtacaaacgtatggaatgcttcttaaaggggaactgtcaagctggtgtcttcagccagatgacatgagagaatatcccagaaccctctctccaaggtgtttctagatagcacaggagagcaggcactgcactgtccacagtccacggtacacagtcgggtgggccgcctcccctctcctgggagcattcgtcgtgcccagcctgagcagggcagctggactgctgctgttcaggagccaccagagccttcctctctttgtaccacagtttcttctgtaaatccagtgttacaatcagtgtgaatggcaaataaacagtttgacaagtacatacaccata

SEQ ID NO: 871 - DNA, 5720 bp, Homo sapiens
ggactccaactgggagggggcgccagcgcacccaggacgcggtgccccaagggaccccattccaagctgcaaactcaagtcccccgcctccccaggccaaacacacccccgcgcccgttcgcagctgccaccccgggtgttccaaagactccggcaaagatctgcgcctcccgggtctccctacccgccagcccgactgcgccgcatcgccagactctgttggcccatcagactccgcccggcagtcggcctcatcaaacttgatttctcacctcctcagccccatcacctccatcctctttccccccgtctcgccttcacccccccaatttcctccttgcccctcatttccaccctcctccccctcccccggccacttcgctaacttgtggctgttgtgatgcgtattcccgtagatccgagcaccagccggcgcttcagccccccctccagcagcctgcagcccggcaaaatgagcgacgtgagcccggtggtggctgcgcaacagcagcagcaacagcagcagcagcaacagcagcagcagcagcagcaacagcagcagcagcagcaggaggcggcggcggcggctgcggcggcggcggcggctgcggcggcggcagctgcagtgccccggttgcggccgccccacgacaaccgcaccatggtggagatcatcgccgaccacccggccgaactcgtccgcaccgacagccccaacttcctgtgctcggtgctgccctcgcactggcgctgcaacaagaccctgcccgtggccttcaaggtggtagccctcggagaggtaccagatgggactgtggttactgtcatggcgggtaacgatgaaaattattctgctgagctccggaatgcctctgctgttatgaaaaaccaagtagcaaggttcaacgatctgagatttgtgggccggagtggacgaggcaagagtttcaccttgaccataaccgtcttcacaaatcctccccaagtagctacctatcacagagcaattaaagttacagtagatggacctcgggaacccagaaggcacagacagaagcttgatgactctaaacctagtttgttctctgaccgcctcagtgatttagggcgcattcctcatcccagtatgagagtaggtgtcccgcctcagaacccacggccctccctgaactctgcaccaagtccttttaatccacaaggacagagtcagattacagaccccaggcaggcacagtcttccccgccgtggtcctatgaccagtcttacccctcctacctgagccagatgacgtccccgtccatccactctaccaccccgctgtcttccacacggggcactgggcttcctgccatcaccgatgtgcctaggcgcatttcagatgatgacactgccacctctgacttctgcctctggccttccactctcagtaagaagagccaggcaggtgcttcagaactgggccctttttcagaccccaggcagttcccaagcatttcatccctcactgagagccgcttctccaacccacgaatgcactatccagccacctttacttacaccccgccagtcacctcaggcatgtccctcggtatgtccgccaccactcactaccacacctacctgccaccaccctaccccggctcttcccaaagccagagtggacccttccagaccagcagcactccatatctctactatggcacttcgtcaggatcctatcagtttcccatggtgccggggggagaccggtctccttccagaatgcttccgccatgcaccaccacctcgaatggcagcacgctattaaatccaaatttgcctaaccagaatgatggtgttgacgctgatggaagccacagcagttccccaactgttttgaattctagtggcagaatggatgaatctgtttggcgaccatattgaaattcctcagcagtggcccagtggtatctgggggccacatcccacacgtatcaatatatacatatatagagagagtgcatatatatgtatatcgattagctatctacaaagtgcctattttttagaagatttttcattcactcactcagtcatgatcttgcagccataagagggtagatattgagaagcagaaggctcaagagagacaattgcaatcgagcttcagattgtttactatttaagatgtacttttacaaaggaacaaagaagggaaaaggtatttttgtttttgttgtttggtctgttatcatcaataacctgttcatatgccaattcagagaggtggactccaggttcaggagggagaagagcaaagccgcttcctctctgtgctttgaaacttcacaccctcacggtggcagctgtgtatggaccagtgccctccgcagacagctcacaaaaccagttgaggtgcactaaagggacatgaggtagaatggatgcttccatcacagtaccatcattcagaataactcttccaatttctgctttcagacatgctgcaggtcctcatctgaactgttgggttcgtttttttttttttttttcctgctccaagaaagtgacttcaaaaataactgatcaggatagattattttattttactttttaacactccttctccccttttcccactgaaccaaaaagaaatcccatccctaaaacctgccttctccttttatgcaaaactgaaaatggcaatacattattatagccataatggtatagatagtgattgcgtttggctatgtgttgttttctttttttttaaattatgaatatgtgtaaaatctgaggtaacttgctaacgtgaatggtcatataactttaaagatatatttataattatttaatgacatttggacccttgaaacatttcttagtgtattgatatgttgacttcggtctctaaaagtgctctttattaaataacaaatttcttcagtggtctagagccatatctgaaatattgctaagcaatttcagttcatccaggcacaatgtgattttaaaaaatacttccatctccaaatattttagatatagattgtttttgtgatgtatgaaggaaatgttatgtttagttctttcagatctttgaatgcctctaacacagctttgccttctaaagcggtaattagggatttaaaaaacaacctttagccctttatcagcatgaaatgctggagtgatgtggttttctaatttctttggggtaattatgactcttgtcatattaaaaagacaagcacaagtaaatcattgaactacagaaaaatgttctgtggtttcatagttaagcaaaactctaaatcgccaggcttcatagcaaagacatagtcagctaaaagccgcacatgtggatagagggttcaattatgagacacctagtacaggagagcaaaattgcaccagagattcttaaccaaccagccttaccaaacaacacaacaggggaaccccaatctgccttacccaaggccccactggcagctttccacagaatttgcatttagaggagcagaatgacatcactgtcctttgggagtaggtcctctgaaaaggcagcaggttccagcaggtagctgagctgagaggacatatggcccacggggacctacagacagcctttgacatttgtatttcttacaatggagggccaaggagggcaaggggctgtggagtttggtgtctactagtgtgtatgaatttgagctagagtccttctgtggcatgcactttgaccactcctggcagtcacatggcagatttccaagtgcaaatccttaatccaaacaaggatcatctaatgacaccaccaggccaatccctgctctcctccccgaaaagtcagggtcccttcattggaatcctccacccacccaagcagaatttagcagagatttgccttcaaaccctaacggcccccttgttctctggtccttctcaaacccacctttgtaggccacccagcattgcaggacagcgtgtggggcagctggacctgtgcttcctgcctgggagtctcccttggaattcatcctgactccttctaataaaaatggatgggaaagcaaaacactttgccttctaaaggccgtataccaagtatgcttagataaataagccacttttctattacttaagtaagaaggaagtagtaattgatactatttattgtttgtgtgtggtagcttgaagcacaccactgtccatttatttgtaagtgtaaaatatgtgtgtttgtttcagcagcacttaaaaaagccagtgtctggttacacatttcaattttaattaattgacataaaaatgctaccgccagtgccagctgcatcctatttaattaaaaaggtactatatttgtacattattttttaatgttaaaagggcttttttaagtttacagtacacataccgagtgactttagggatgcttttgtgttgaaatgttactatagtggctgcaggcagcaacccagaaacactttagaagctttttttccttgggaaaaattcaagcacttcttccctccaccctcactccaaccaccccaatgggggtaattcacatttcttagaacaaattctgcccttttttggtctagggattaaaattttgtttttctttctttctttttttttttttttcactgaacccttaatttgcactgggtcatgtgtttgatttgtgatttcaagaccaaagcaaagtcttactactactgtggaaccatgtactagttcctgggaattaaaatagcgtggttctctttgtagcacaaacattgctggaatttgcagtcttttcaatgcagccacatttttatccatttcagttgtctcacaaattttaacccatatcagagttccagaacaggtaccacagctttggttttagattagtggaataacattcagcccagaactgagaaactcaacagattaactatcgtttgctctttagacggtctcactgcctctcacttgccagagccctttcaaaatgagcagagaagtccacaccattagggaccatctgtgataaattcagaagggaggagatgtgtgtacagctttaaggattccctcaattccgaggaaagggactggcccagaatccaggttaatacatggaaacacgaagcattagcaaaagtaataattatacctatggtatttgaaagaacaataataaaagacacttcttccaaaccttgaatttgttgtttttagaaaacgaatgcatttaaaaatattttctatgtgagaattttttagatgtgtgtttacttcatgtttacaaataactgtttgctttttaatgcagtactttgaaatatatcagccaaaaccataacttacaataatttcttaggtattctgaataaaattccatttcttttggatatgctttaccattcttaggtttctgtggaacaaaaatatttgtagcattttgtgtaaatacaagctttcatttttattttttccaattgctattgcccaagaattgctttccatgcacatattgtaaaaattccgctttgtgccacaggtcatgattgtggatgagtttactcttaacttcaaagggactatttgtattgtatgttgcaactgtaaattgaattatttggcatttttctcatgattgtaatattaatttgaagtttgaatttaattttcaataaaatggcttttttggttttgttaaaaaaaaaaaaaaaaaaaa

SEQ ID NO: 872 - DNA, 4270 bp, Homo sapiens
cccgccacttgattctggaggatttgttctggggctgcggccgcggagtcggggcggccgcgggcgagcttcggggcgggaggcggcggcagcggcacagccccgcgcgggccccgccgcggcccaggcagccgggacagccacgaggggcggccgcacgcggggccgcgcgccgaggatgcgggactagccgggcaggctgcgggcggccgtcgggccagcgaggcctcgcagcgggcgggccctggcgagtagtggccgggcgccgccccctgcgccctgaggcccgggccccgccgcttctgctttcccgcttctcgcggcagcggcggccgaggaggcgcccgcgccggccgcccccgggggaagccgcgccgtctccgcctgcccggcgccctgacggccgctgttatgcgtattcccgtagacccaagcaccagccgccgcttcacacctccctccccggccttcccctgcggcggcggcggcggcaagatgggcgagaacagcggcgcgctgagcgcgcaggcggccgtggggcccggagggcgcgcccggcccgaggtgcgctcgatggtggacgtgctggcggaccacgcaggcgagctcgtgcgcaccgacagccccaacttcctctgctccgtgctgccctcgcactggcgctgcaacaagacgctgcccgtcgccttcaaggtggtggcattgggggacgtgccggatggtacggtggtgactgtgatggcaggcaatgacgagaactactccgctgagctgcgcaatgcctcggccgtcatgaagaaccaggtggccaggttcaacgaccttcgcttcgtgggccgcagtgggcgagggaagagtttcaccctgaccatcactgtgttcaccaaccccacccaagtggcgacctaccaccgagccatcaaggtgaccgtggacggaccccgggagcccagacggcaccggcagaagctggaggaccagaccaagccgttccctgaccgctttggggacctggaacggctgcgcatgcgggtgacaccgagcacacccagcccccgaggctcactcagcaccacaagccacttcagcagccagccccagaccccaatccaaggcacctcggaactgaacccattctccgacccccgccagtttgaccgctccttccccacgctgccaaccctcacggagagccgcttcccagaccccaggatgcattatcccggggccatgtcagctgccttcccctacagcgccacgccctcgggcacgagcatcagcagcctcagcgtggcgggcatgccggccaccagccgcttccaccatacctacctcccgccaccctacccgggggccccgcagaaccagagcgggcccttccaggccaacccgtccccctaccacctctactacgggacatcctctggctcctaccagttctccatggtggccggcagcagcagtgggggcgaccgctcacctacccgcatgctggcctcttgcaccagcagcgctgcctctgtcgccgccggcaacctcatgaaccccagcctgggcggccagagtgatggcgtggaggccgacggcagccacagcaactcacccacggccctgagcacgccaggccgcatggatgaggccgtgtggcggccctactgaccgccctggtggactcctcccgctggaggcggggaccctaacaaccttcaagaccagtgatgggccggctccgaggctccgggcgggaatgggacctgcgctccagggtggtctcggtcccagggtggtcccagctggtgggagcctctggctgcatctgtgcagccacatccttgtacagaggcataggttaccacccccaccccggcccgggatactgcccccggcccagatcctggccgtctcatcccatacttctgtggggaatcagcctcctgccacccccccggaaggacctcactgtctccagctatgcccagtgctgcatgggacccatgtctcctgggacagaggccatctctcttccagagagaggcagcattggcccacaggataagcctcaggccctgggaaacctcccgacccctgcaccttcgttggagcccctgcatcccctgggtccagccccctctgcatttacacagatttgagtcagaactggaaagtgtcccccacccccaccaccctcgagcggggttcccctcattgtacagatggggcaggacccagcacgctgctggcagagatggtttgagaacacatccaagccagtccccccagcccagcttcccctccgttcctaactgttggctttcccccagccgcacgggtcccaggccccagagaagatgagtctatggcatcaggttcttaaacccaggaaagcacctacagaccggctcctccatgcactttaccagctcaacgcatccactctctgttctcttggcagggcgggggaggggggataggaggtcccctttcccctaggtggtctcataattccatttgtggagagaacaggagggccagatagataggtcctagcagaaggcattgaggtgagggatcattttgggtcagacatcaatgtccctgtcccccctgggtccagccaagctgtgccccatcccccaagcctcctgggaggatccagccaaatcttgcgactcctggcacacacctgtctgtaacctgttttgtgctctgaaagcaaatagtcctgagcaaaaaaaaaaaaaaaacaaaaaaacaaaaaaaaaacaaaacagtttttaaaactgattttagaaaaagaagcttaatctaacgttttcaaacacaaggtctcttacaggtatagttccgtgattatgatagctctgtgattataagcaacatccccgccccctctcccccccgcggacccccagctgcctcctgagggtgtggggttattagggtctcaatactttctcaaggggctacactccccatcaggcagcatcccaccagcctgcaccacaggctcccctgggaggacgagggaaacgctgatgagacgctgggcatctctcctctgtggctctaggacatctgtccaggaggctgggcggaggtgggcaggatgtgagaggtggggagtactggctgtgcgtggcaggacagaagcactgtaaagggctctccagccgcagctcagctgcactgcgttccgaggtgaagtcttgcccctgaattttgcaaaatgggaaagtgggcgcttgcccaagggccaggctgcatggattctcacatcagagttctctggccctagaaaggcttagaaaaggcgtaagggaactcataaaggctagcagcatgcggtattttaactttctgcctcggcctctgtggatgcagaaatctgccctacaaaatgctcttcattggttgtctctgtgagagcactgtccccacccaacctgtcacaacggccagaaccatacaccagagacacactggcaggttaggcagtccttctggtgatcctattccattccctcctgctgcggtttctcttggcctgtcctcactggaaaaacagtctccatctcctcaaaatagttgctgactccctgcacccaaggggcctctccatgccttcttaggaagcagctatgaatccattgtccttgtagtttcttccctcctgttctctggttatagctggtcccaggtcagcgtgggaggcacctttgggttcccagtgcccagcactttgtagtctcatcccagattactaacccttcctgatcctggagaggcagggatagtaaataaattgctcttcctaccccatcccccatcccctgacaaaaagtgacggcagccgtactgagtctgtaaggcccaaagtgggtacagacagcctgggctggtaaaagtaggtccttatttacaaggctgcgttaaagttgtactaggcaaacacactgatgtaggaagcacgaggaaaggaagacgttttgatatagtgttactgtgagcctgtcagtagtgggtaccaatcttttgtgacatattgtcatgctgaggtgtgacacctgctgcactcatctgatgtaaaaccatcccagagctggcgagaggatggagctgggtggaaactgctttgcactatcgtttgcttggtgtttgtttttaacgcacaacttgcttgtacagtaaactgtcttctgtactatttaactgtaaaatggaattttgactgatttgttacaataatataactctgagatgtgtggaagga

SEQ ID NO: 873 - DNA, 5547 bp, Homo sapiens
gcgacttttgcaacaactcgccgcgccgcggcctccgcgcgccgccgccgccaccgcagccgccggctccccgccgcccgggcccgggccggccgcgccgggggccgccgcgcccgccgcccgctgcctgcgccgccggccgggcatgagttagtcgcagacatggacaccaaacatttcctgccgctcgatttctccacccaggtgaactcctccctcacctccccgacggggcgaggctccatggctgccccctcgctgcacccgtccctggggcctggcatcggctccccgggacagctgcattctcccatcagcaccctgagctcccccatcaacggcatgggcccgcctttctcggtcatcagctcccccatgggcccccactccatgtcggtgcccaccacacccaccctgggcttcagcactggcagcccccagctcagctcacctatgaaccccgtcagcagcagcgaggacatcaagccccccctgggcctcaatggcgtcctcaaggtccccgcccacccctcaggaaacatggcttccttcaccaagcacatctgcgccatctgcggggaccgctcctcaggcaagcactatggagtgtacagctgcgaggggtgcaagggcttcttcaagcggacggtgcgcaaggacctgacctacacctgccgcgacaacaaggactgcctgattgacaagcggcagcggaaccggtgccagtactgccgctaccagaagtgcctggccatgggcatgaagcgggaagccgtgcaggaggagcggcagcgtggcaaggaccggaacgagaatgaggtggagtcgaccagcagcgccaacgaggacatgccggtggagaggatcctggaggctgagctggccgtggagcccaagaccgagacctacgtggaggcaaacatggggctgaaccccagctcgccgaacgaccctgtcaccaacatttgccaagcagccgacaaacagcttttcaccctggtggagtgggccaagcggatcccacacttctcagagctgcccctggacgaccaggtcatcctgctgcgggcaggctggaatgagctgctcatcgcctccttctcccaccgctccatcgccgtgaaggacgggatcctcctggccaccgggctgcacgtccaccggaacagcgcccacagcgcaggggtgggcgccatctttgacagggtgctgacggagcttgtgtccaagatgcgggacatgcagatggacaagacggagctgggctgcctgcgcgccatcgtcctctttaaccctgactccaaggggctctcgaacccggccgaggtggaggcgctgagggagaaggtctatgcgtccttggaggcctactgcaagcacaagtacccagagcagccgggaaggttcgctaagctcttgctccgcctgccggctctgcgctccatcgggctcaaatgcctggaacatctcttcttcttcaagctcatcggggacacacccattgacaccttccttatggagatgctggaggcgccgcaccaaatgacttaggcctgcgggcccatcctttgtgcccacccgttctggccaccctgcctggacgccagctgttcttctcagcctgagccctgtccctgcccttctctgcctggcctgtttggactttggggcacagcctgtcactgctctgcctaagagatgtgttgtcaccctccttatttctgttactacttgtctgtggcccagggcagtggctttcctgaggcagcagccttcgtggcaagaactagcgtgagcccagccaggcgcctccccaccgggctctcaggacaccctgccacaccccacggggcttgggcgactacagggtcttcgggccccagccctggagctgcaggagttgggaacggggcttttgtttccgttgctgtttatcgatgctggttttcagaattcctgtgtggccctcctgtctggagtgacatcttcatctgctctgaatactggtgcccagccagcccgtgacagcttccccctaatcaggaggggacagctgggggcgcaagctggtgtgtcatcagcaaagacctcagccgcctcggggatgagaggggactcgtggggcaagcaagctgccctgtgctctgagtgagggggaaggtagcccctttttccaaagataactcacagttttgccctcgagccaatgagaacatgagctgccctctgtgcaaggtttcggggccacctccaggctgcaggggcgggtcactcacccccctgttttctctctgccttggtgttctggtttcagactcccgactccccgttcagaccagagtgccccggcccctccccagcctgagtcttctccttgctctgcggggtgggctgaggcttgtccttgtttcctgcagggctggccctggctcgggcagggtggggcatcaccacctcactggccttgctggaggcacagggctctgcggacctgcagccatctgtgaggcccgcggggatgggaggggaggagggtggcctgttggtttccctcagagggggcaggtggcctggagagagaggggctcaggaactgggagcctcgtgggtggggcagatgctccgcggcctggagtggctctgccggggcattggtgggacccctgctcaggccttctctctggctgccagttgtgtctaaaagactcttggaatctgagaacccggagtcgcagcgccctcgggcctgggccacacgcaggccctggtgggaccacccagcctggtattgtccacggacagcgttgttcacccagagccttacttgggagcctcactgaacgcctgctctggttgaaggtggggtgggggcggggcttggggcctccctggctcagcccagtgcggcctggcgctcctcccgcaggctctgcccccgggctccggtggtgcggggccctctcaggttgaactcgcctcttttgcactggaaggccctccctttggcctgagtacttttcccgttcacgcctcagtcccgtggacccagcctttgtcagtggcaggtgcctgaacagagggtggatgggggggataccggagggggtcttgtcttcccagccgcagtctaggaatgatgcgggggggtggacgccttctccatagtctttccccacctggagcaggggcttcctcagtggtgaggggagctgcctacaggttggaccgggaggcagtggcttggagaggcagctttccagccttggtggggaagaaagtgtccattctttgccttcctggagctcccagccagagctgagcttaggcacccgagtggagcctgcagctgagtctgtgcccgagacaggctgtcagagattccagaagcctctcctccccgccgccctccacccctgcctttcagcgttgtggatccctagaggtggccccctgcccgatccaccgtcctgaggcagagtgttgagcctcatacctgtaccaggtccccggccagctgggcccctcccaggcactgccaggaagccccagctgcccctggcgggtgtggtggaaatggcaggagggtgcaggtactcttggggccccagcggtgggagtgcaaaagacccaacgccaacacctggtgccttctgcagccagcgcccacccatccgtgcccggacccttgggaatgcccgcggctccagaggaaaaagcccagggacggggcctccgttgcggggggtcggctgcttcttgggaactttgtcgtttccggcgctggctggctggctggctggctgtaaagcactgaagccccccggccgccaacccctgaaagcagaacctggcctccctggccacagcagccttacccaccgctctacgtgtcccgggcacttcccgcagccttcccgtccctttctcatcggccttgtagttgtacagtgctgttggtttgaaaaggtgatgtgtggggagtgcggctcatcactgagtagagaggtagaatttctatttaaccagacctgtagtagtattaccaatccagttcaattaaggtgattttttgtaattattattattttggtgggacaatctttaattttctaaagatagcactaacatcagctcattagccacctgtgcctgtccccgccttggcccggctggatgaagcggcttccccgcagggcccccacttcccagtggctgcttcctggggacccagggcaccccggcaccttcaggcacgctcctcagctggtcacctcccggctttgccgttcagatggggctcctgaggctcaggagtgaagatgccacagagccgggctcccctaggctgcgtcgggcatgcttggaagctggcctgccaggaccttccaccctggggcctgtgtcagccgccggccctccgcaccctggaagcacacggcctctgggaaggacagccctgaccttcggttttccgagcacggtgtttcccaagaattctgggctggcggcctggtggcagtgctggagatgaccccgagcccctccccgtggggcacccaggagggccctgccggaatgtgcagcctgtgggtagtcggctggtgtccctgtcgtggagctggggtgcgtgatctggtgctcgtccacgcaggtgtgtggtgtaaacatgtatgtgctgtacagagagacgcgtgtggagagagccgcacaccagcgccacccaggaaaggcggagcggttaccagtgttttgtgtttatttttaatcaagacgtttcccctgttttcctataaatttgcttcgtgtaagcaagtacataaggaccctcctttggtgaaatccgggttcgaatgaatatctcaaggcaggagatgcatctattttaagatgctttggagcagacagctttagccgttcccaatccttagcaatgccttagctgggacgcatagctaatactttagagaggatgacagatccataaagagagtaaagataagagaaaatgtctaaagcatctggaaaggtaaaaaaaaaaaatctatttttgtacaaatgtaattttatccctcatgtatacttggatatggcggggggagggctgggactgtttcgtttctgcttctagagattgaggtgaaagcttcgtccgagaaacgccaggacagacgatggcagaggagagggctcctgtgacggcggcgaggcttgggaggaaaccgccgcaatgggggtgtcttccctcggggcaggagggtgggcctgaggctttcaagggttttcttccctttcgagtaatttttaaagccttgctctgttgtgtcctgttgccggctctggccttcctgtgactgactgtgaagtggcttctccgtacgattgtctctgaaacatcgtggcctcaggtgccagggtttgatggacagtagcattagaattgtggaaaaggaacacgcaaagggagaagtgtgagaggagaaacaaaatatgagcgtttaaaatacatcgccattcagttcgttaaaaaaaaaaaaaaaaaaaaaaaaa

SEQ ID NO: 874 - DNA, 2892 bp, Homo sapiens
caaagatggctgccacattggcgctgtcattttggtactgagcagagcgacgggcttaattcgacccaatccaggccagagtctttctctcaggggcttcctcgtgctcagctaatcctccgatcaatccttgggaatccctgggacctcttcggtatccctactctcagccagggatcatgtcttgggccgctcgcccgcccttcctccctcagcggcatgccgcagggcagtgtgggccggtgggggtgcgaaaagaaatgcattgtggggtcgcgtcccggtggcggcggcgacggccctggctggatcccgcagcggcggcggcggcggcggtggcaggcggagaacaacaaaccccggagccggagccaggggaggctggacgggacgggatgggcgacagcgggcgggactcccgaagcccagacagctcctccccaaatccccttccccagggagtccctcccccttctcctcctgggccacccctacccccttcaacagctccatcccttggaggctctggggccccacccccacccccgatgccaccacccccactgggctctccctttccagtcatcagttcttccatggggtcccctggtctgccccctccagctcccccaggattctccgggcctgtcagcagcccccagattaactcaacagtgtcactccctgggggtgggtctggcccccctgaagatgtgaagccaccagtcttaggggtccggggcctgcactgtccaccccctccaggtggccctggggctggcaaacggctatgtgcaatctgcggggacagaagctcaggcaaacactacggggtttacagctgtgagggttgcaagggcttcttcaaacgcaccatccgcaaagaccttacatactcttgccgggacaacaaagactgcacagtggacaagcgccagcggaaccgctgtcagtactgccgctatcagaagtgcctggccactggcatgaagagggaggcggtacaggaggagcgtcagcggggaaaggacaaggatggggatggggagggggctgggggagcccccgaggagatgcctgtggacaggatcctggaggcagagcttgctgtggaacagaagagtgaccagggcgttgagggtcctgggggaaccgggggtagcggcagcagcccaaatgaccctgtgactaacatctgtcaggcagctgacaaacagctattcacgcttgttgagtgggcgaagaggatcccacacttttcctccttgcctctggatgatcaggtcatattgctgcgggcaggctggaatgaactcctcattgcctccttctcacaccgatccattgatgttcgagatggcatcctccttgccacaggtcttcacgtgcaccgcaactcagcccattcagcaggagtaggagccatctttgatcgggtgctgacagagctagtgtccaaaatgcgtgacatgaggatggacaagacagagcttggctgcctgagggcaatcattctgtttaatccagatgccaagggcctctccaaccctagtgaggtggaggtcctgcgggagaaagtgtatgcatcactggagacctactgcaaacagaagtaccctgagcagcagggacggtttgccaagctgctgctacgtcttcctgccctccggtccattggccttaagtgtctagagcatctgtttttcttcaagctcattggtgacacccccatcgacaccttcctcatggagatgcttgaggctccccatcaactggcctgagctcagacccagacgtggtgcttctcacactggaggagcacacatccaagagggactccaagccctggggcagggtggggggccatgttcccagaaccttgatggggtgagaagtacagggcagaaccaagaacataaaccctccaagggatctgcttgatatcccaagttggaagggaccccagatacctgtgaggactggttgtctctcttcggtggccttgagtctctgaatttgtcgggttctcccatgatttggggtgatttctcaccctctgtccttcccccagcacaaagcactggccttgcctccaggaccttgcttccttctcatcttgcctcattttgcttcccatctgaagagtggaaatggggaactcccccagaggtggatactggggggcaggcctcccaagctgatggacatgagagtagggccctgacaggccttcctcctctcaaacctggcagatgggggcctctctggaagagggaggggccctgtcactgtccagagtctctttttacacttcacctccttctgcagtcagactgaaatataaaaaaggtggtggtggtggtgaaggggctggtggagatgtaggaaccgatctgctatttttaatttcctgtgaggatagagacttgcagttagactcaaagaagtactgtactttcccaggttgactaagaaatgccagtggtggaggtgggtgtttgggaaaggcagggccctgaaatggcctgtccctagggctctccaagcactagccttcccagcttcccgccgccccccctatctcttcctgtctaacttggggaaggggcctgggctgtgaggacagggcccccacaggggatggtttcacgagtgtagtcccggaggccttccctttacagctctcctccagccctgggcacatagcataggctggggacacaggatcctggcctgagaattgaggggaggtggccagcccgcagaggtggggtgctggggctgcatgatttttgccctgcgtcccttctctttggggctcctttcccctctcatacataaaatcgctttcaaattaaaatcgctgttttctggaaaaaaaaaaaaaaaaaa

SEQ ID NO: 875 - DNA, 1856 bp, Homo sapiens
gtggcaagagtagcggtgacggcggcggcggcggcggcggcagcattatgcgtgattactgacaggcaccagctgctgccgccacagccgtctcaaacgcactatgtggactctccgatctagaggcagattcctgactaatcccagagggctggcccagcctgtgctccccgggctgctaggaagcgatgaccactcttgttagcccaagttgaagaaagccgggctgtgcctgggagccgagagaggcggtaatatttagaagctgcacaggagaggaacatgaactgacgagtaaacatgtatggaaattattctcacttcatgaagtttcccgcaggctatggaggctcccctggccacactggctctacatccatgagcccatcagcagccttgtccacagggaagccaatggacagccaccccagctacacagataccccagtgagtgccccacggactctgagtgcagtggggacccccctcaatgccctgggctctccatatcgagtcatcacctctgccatgggcccaccctcaggagcacttgcagcgcctccaggaatcaacttggttgccccacccagctctcagctaaatgtggtcaacagtgtcagcagttcagaggacatcaagcccttaccagggcttcccgggattggaaacatgaactacccatccaccagccccggatctctggttaaacacatctgtgccatctgtggagacagatcctcaggaaagcactacggggtatacagttgtgaaggctgcaaagggttcttcaagaggacgataaggaaggacctcatctacacgtgtcgggataataaagactgcctcattgacaagcgtcagcgcaaccgctgccagtactgtcgctatcagaagtgccttgtcatgggcatgaagagggaagctgtgcaagaagaaagacagaggagccgagagcgagctgagagtgaggcagaatgtgctaccagtggtcatgaagacatgcctgtggagaggattctagaagctgaacttgctgttgaaccaaagacagaatcctatggtgacatgaatatggagaactcgacaaatgaccctgttaccaacatatgtcatgctgctgacaagcagcttttcaccctcgttgaatgggccaagcgtattccccacttctctgacctcaccttggaggaccaggtcattttgcttcgggcagggtggaatgaattgctgattgcctctttctcccaccgctcagtttccgtgcaggatggcatccttctggccacgggtttacatgtccaccggagcagtgcccacagtgctggggtcggctccatctttgacagagtcctaactgagctggtttccaaaatgaaagacatgcagatggacaagtcggaactgggatgcctgcgagccattgtactctttaacccagatgccaagggcctgtccaacccctctgaggtggagactctgcgagagaaggtttatgccacccttgaggcctacaccaagcagaagtatccggaacagccaggcaggtttgccaagctgctgctgcgcctcccagctctgcgttccattggcttgaaatgcctggagcacctcttcttcttcaagctcatcggggacacccccattgacaccttcctcatggagatgttggagaccccgctgcagatcacctgagccccaccagccacagcctccccacccaggatgacccctgggcaggtgtgtgtggacccccaccctgcactttcctccacctcccaccctgacccccttcctgtccccaaaatgtgatgcttataataaagaaaacctttctacacatgaaaaaaaaaaaaaaa

SEQ ID NO: 876 - DNA, 4562 bp, Homo sapiens
gggccggtccgcgacgactccccggacggcgtttctcctccgagcggcgccggtttcggcttggggggggcggggtacagcccatccatgaccatgggcgacaagaagagcccgaccaggccaaaaagacaagcgaaacctgccgcagacgaagggttttgggattgtagcgtctgcaccttcagaaacagtgctgaagcctttaaatgcagcatctgcgatgtgaggaaaggcacctccaccagaaaacctcggatcaattctcagctggtggcacaacaagtggcacaacagtatgccaccccaccaccccctaaaaaggagaagaaggagaaagttgaaaagcaggacaaagagaaacctgagaaagacaaggaaattagtcctagtgttaccaagaaaaataccaacaagaaaaccaaaccaaagtctgacattctgaaagatcctcctagtgaagcaaacagcatacagtctgcaaatgctacaacaaagaccagcgaaacaaatcacacctcaaggccccggctgaaaaacgtggacaggagcactgcacagcagttggcagtaactgtgggcaacgtcaccgtcattatcacagactttaaggaaaagactcgctcctcatcgacatcctcatccacagtgacctccagtgcagggtcagaacagcagaaccagagcagctcggggtcagagagcacagacaagggctcctcccgttcctccacgccaaagggcgacatgtcagcagtcaatgatgaatctttctgaaattgcacatggaattgtgaaaactatgaatcagggtatgaaattcaaaacctccacctgcccatgctgcttgcatccctggagaatcttctgtggacatcgacctcttagtgatgctgccaggataatttctgcttgccatgggcatctggccaccaaggaatttcgcaccctgacgattactcttgacacttttatgtattccattgttttatatgattttcctaacaatcatttataattggatgtgctcctgaatctactttttataaaaaaaaaaaaatctgctgtgcacaattttccatgtacattacaactggttttttgtttttgttttgttgccggtggggagggctgggagggggagggaacttttatttattgtgttcacaaactccatcctttcagcatatccttttaagtttagttctttcttccagttatactatgtactatcagttttgatataactatatatatataaatataaaattatatataaagggttatttgaaaccaatccatggcaacgctggtgcttgatacactgtgaagtgaatacaacattgaacagttacagatctgggacagtcccttctatgaaagtgctgaaatttaattaaaatcagtcttatatgaagtatgttccaatccatgtgggaacttgactctctcatctgtctaaagagtactggacgatataaaaatatatattttttaaacaatgtgatctcaaatttaaagactgctccagatagcctgcatttgcaatggaataactgacaaatcacaagtggtttagttgggcagggctttgatcattcaaaagtaactaaagtagctccagaatgccaagtattcgtgtaaattacggttacatgttatcatttgctgttcttacataagcactcatgaaaatatggtattctgtaacttgaattccatccattttccagacctctactcatgtctgaggtaaatctagaaattgtcttagttttaggattgaaacagtctataaactgtatttttggtccatccaggaagctagtcccttgtttctcctttctacatgacattgcagtggtggtttctgtaattaaaatttgtttgcctcatgtccctttgtctgataaaccttcactctaccgattcagttgtgagcattctttttttccttctcaaaacctactatgatttgttttactgaacaaaggttatcaaccacacatccagtcctgacatggagcttttcagtgtttggagacatttctcaatcccctgctgtggtaggaactccagtggtgaacggcttgcgcgcctgcagccagagttgcagggaaagctcgtacttactgcgagcagcatgtaatcttttttcttcctggacataaagatagcttgagtaaactgttctatttcattctcttcactctttttactgtcttgcaaaaaaaaaaaaaaaaaaaataatcaaagaccactaataagattccacctctccttattaaaataattttttaaaattttgttttgcttttgtttggatgtggggtctctcttctatttgacttttacatttagatacagagtttgtagtacttcagagacatttcaagcatgagaatttgaggttacctctctttatttgacctttagggactcacgggagggcagcctgatttgtaatgaagcaccacattttggtgttaaaaacctggtttgcttaataatagcagtaatttctgtctgtggaggcaacaaataaaaaaattaacagcttgaattgagtagccaacaggaaaggttcctttcacatttacattaaaactattctgtagtcactaatgtaccataatttaaattcttttctcaaaggtatagattataaagcagtgccatttgttgctgtggtcctattctcaaatgcatggacaatgttcccccctttttaaaataatgcttgtgtctgggatgcaagctttgcttatctttttaaatacatttttaaagtatttattaatgaaccaaaggaaatcagatgctttctataagcatcagaatatataatacatagtgatttgactatgaattttaaatccacattttaatattggtgggatattgcaaagacattccttctaaagttttaatattccttttattaagggtctcagggagggtaaattagtcagccatatttattttccagaggtttaagaaattgctgtttttaactttttgaaaaaacttaaatgccaccaaactcatgtaggttgcactgcttattgaaccaataactgttggtatgcactttgttcagacacactgtgtactttttcaaaaactagtttcatgtaaagtgattggaccccatagattagtggaaaaagctgattaaccagctactcataggctgctaattcattcatgccaatgttttggtttttcagttttgcctccgtgataaattaaagaatggggaggggtgaaggaaggggaagaagattgctttagaacaagtggcatgaaattaccatctttgtagaaaccgcagctaacagtgggagttatctaagcaatcagatgttacagggccagccctttagctgctgtggtgtattctgttgggtagtgaggtagtaggtactttatagacttttaattttggaaattgatgacatccctcaggcatgtattctggaaatggaattcctgtaacttcctgtgtctgcagtatgccctacaattagtaggcagcgtgtaaaaacactagtgtagattataaagatatacattaaaagaggaccagaaatacttggtattcagtggcacagaaagcaggttaaacaaacaaaaagcacagtgttacgcttgcaagtttccatttgttttaataccacgcaatctttcacactcgtgcgtgtgcgcgcacacagagcttacctgacttgctctgcttgagtcatgcagttacaaaaaaaaagacatcttgacacccacacaatattctaatcaaaacctttcagtttcaatctggatatttaaaaacattggcagaagcttctgtgagtttagttccactaagatgtttcacctgccttatcaagaccattctcagtctacttttttaagctaccgtatcttaaattattgaaaatttattaattgctgaatatataataacctttgcttgtatgtaaccgaaaatggtttaagagccaacatttagagtatgacaatggagctgaacagtttttaatgcgcaagcagttctgttcttgtgtatgacttgtaaccttaatttactgtgtaaagatggttacattatttccttagctttgtttgttggagacaaatagagaatgcttgttaagtatgtcaaaacaatcttatcttgtgaatttttgttaatgtattatacgagctatatttttcatttgcccagaaagacagcttgtataacgcttttggaagtttctgctctgtaatgtctttagagctgacagtctgttaggtttgtttttttcttcatgctaaagtgtcagttggtggttttgtgaactggtcaaaaattcacaggtcttaaatgttttgggggaaatttatattggacactgctctttgtctagcaaataaaagatgttaatatattcctgttactggcatgtgcacgactatgttattagaagccactttatcattttcctgctttaaatagaaatgtctatttatgaattctgcttgtagttttttcacaaataaaatagtaaaatttacattggaaa

SEQ ID NO: 877 - DNA, 3018 bp, Homo sapiens
ataaaaccggcccggttctgtggaaagtgggcggcggagccagggtccctggaatggcggagactctgtcaggcctaggtgattctggagcggcgggcgcggcggctctgagctccgcctcgtcagagaccgggacgcggcgcctcagcgacctgcgagtgatcgatctgcgggcggagctgaggaaacggaatgtggactcgagcggcaacaagagcgttttgatggagcggctgaagaaggcaattgaagatgaaggtggtaatcctgacgaaattgaaattacctccgagggaaacaagaaaacatcaaagaggtctagcaaagggcgcaaaccagaagaagagggtgtggaagataacgggctggaggaaaactctggggatggacaggaggatgttgagaccagtctggagaacttgcaggacatcgacatcatggatatcagtgtgttggatgaagcagaaattgataatggaagcgttgcagattgtgtcgaagacgatgatgctgataacctccaggagtccctgtcggatagtagagagctagtcgagggggaaatgaaagagcttccggagcagcttcaggaacatgctatagaggacaaagaaactataaacaatttagatacttcatcatctgacttcactatattacaggaaattgaagagccatccctggagccagaaaatgagaaaatactcgacattttgggggaaacttgtaaatctgagccagtaaaagaagaaagttccgagctggagcagccatttgcacaggacacaagtagcgtggggccagacagaaagcttgcggaggaagaggacctatttgacagcgcccatccggaagagggtgatttagatttggccagcgagtcaacagcacacgctcagtcgagcaaggcagacagcctgttagcggtagtgaaaagggagcccgcggagcagccaggcgatggcgagaggacggactgtgagcctgtagggctagagccggcagttgagcagagtagtgcggcctccgagctcgcggaggcctctagcgaggagctcgcagaagcacccacggaagccccaagcccagaagccagagatagcaaagaagacgggaggaagtttgattttgacgcttgtaatgaagtccctccggctcctaaagagtcctcaaccagtgagggcgctgatcagaaaatgagttctcccgaagatgactcggatacaaaaaggctttccaaagaggaaaagggtcgcagcagttgtggtagaaatttctgggttagtggactctcttctacaaccagagctacagatttgaagaatcttttcagcaaatatgggaaggtggtgggcgccaaggttgtgacaaatgcccggagtcctggagctcgctgttacggttttgtcacgatgtccacagcagaagaggccacaaaatgcattaaccacctgcacaagacggagctccacggaaagatgatctccgtggagaaagccaaaaatgaacctgtgggaaagaaaacctctgacaaaagagacagtgacgggaaaaaggagaagtcgagcaacagtgacagatctacaaaccttaagagggatgataaatgtgacagaaaagatgatgctaagaagggtgacgacggaagtggagaaaagagtaaggaccaagatgatcagaaacctggcccctcagagcgatctcgagccacaaagtcaggaagtcgagggaccgaacggactgtagtaatggataaatccaaaggggtgcctgtgattagtgtaaaaacgtccgggtccaaagagagagcttccaaaagccaggatcgcaaatcagccagcagagagaagcggtccgtcgtgtcctttgataaggtcaaggagcctcggaagtcaagagactcagagtcccatagcagggtgcgtgaacgcagtgaacgcgaacaacgcatgcaggcgcagtgggagcgcgaggagcgtgagcggctggagattgcccgagagaggctggccttccagcgccagcggctggagcgggagcgcatggagcgggaacggctggagcgcgaacgcatgcacgtggagcacgagcgcaggcgcgagcaggagcgcatccaccgtgagcgcgaggagctgaggcgccagcaggaactgcgctatgagcaggagcggcggcccgcggtgcggcggccctacgacctggaccggcgagatgatgcctattggccggaagccaagcgggccgccctggatgagcgctaccattctgactttaaccgccaggaccgcttccacgactttgaccacagggaccgcggccgctaccccgaccactcggtggacaggagagaaggttcaaggtcaatgatgggagaacgagaaggacagcattacccagaacgccatggaggaccagagcgccacggccgggactcccgcgatggctgggggggctatggctctgacaagaggatgagcgagggccgggggctgcctcctccccccagacgtgactggggggaccatggccgaagagaggatgaccggtcatggcagggcacggccgacgggggcatgatggacagggatcacaagaggtggcaaggtggcgagagaagcatgtccggtcactccgggcctggccacatgatgaaccgaggaggaatgtcagggcgcggcagctttgccccaggcggggcctcccggggccaccccatcccacacggtggcatgcagggcgggtttggaggccagagccgggggagcaggcccagcgatgcccgcttcactcgccgctactgagtacttggaatcctgtgtcctgtctcgtggcaacaaggctatgttctgttaggagttaccttaaactgtgtaaaaatatttttttttaatctgctgccatattgtagctcaatacaatgtgaatttgtttttcgttttggggttttttttttttgtaataaatgtgtttccgttcacataccctttaaaaaaaaaaaaaaaaaaaaaaaaaaaaaaa

SEQ ID NO: 878 - DNA, 5143 bp, Homo sapiens
ttattctgccccagctgatgtttgagccagcatgtcgcggaggaagcaagcgaagcctcaacatttccaatccgaccccgaagtggcctcgctcccccggcgagatggagacacagaaaagggtcaaccgagtcgccctactaagagcaaggatgcccacgtctgtggccggtgctgtgccgagttctttgaattatcagatcttctgctccacaagaagaactgtactaaaaatcaattagttttaatcgtaaatgaaaatccagcctccccacccgaaaccttctcccccagcccccctcctgataatcctgatgaacaaatgaatgacacagttaacaaaacagatcaagtggactgcagcgacctttcagaacacaacggacttgacagggaagagtccatggaggtggaggccccggttgctaacaaaagcggcagcggcacttccagcggcagccacagcagtaccgccccaagcagcagcagcagcagcagcagcagcagcggcggcggcggcagctcctccacaggtacctcagcgatcacaacctctctacctcaactcggggacctgacaacactgggcaacttctccgtaatcaacagcaacgtcatcatcgagaacctccagagcaccaaggtggcggtggcccagttctcccaggaagcgaggtgcggcggggcctctgggggcaagctggccgtcccagccctcatggaacaactcctagctctgcagcagcagcagatccaccagctgcaattgatcgaacagattcgtcaccaaatattgctgttggcttctcagaatgcagacttgccaacatcttctagtccttctcaaggtactttacgaacatctgccaaccccttgtccacgctaagttcccatttatctcagcagctggcagcagcagctggattggcacagagcctcgccagccaatctgccagcattagtggtgtgaaacagctacccccaatccagctacctcagagcagttctggcaacaccatcattccatccaacagcggctcttctcccaatatgaacatattggcagcggcagttaccaccccgtcctctgaaaaagtggcttcaagtgctggggcctcccatgtcagcaacccagcggtctcatcatcgtcctcaccagcttttgcaataagcagtttattaagtcctgcgtctaatccacttctacctcagcaagcctccgctaactcggttttccccagccctttgcccaacatcggaacaactgcagaggatttaaactccttgtctgccttggcccagcaaagaaaaagcaagccaccaaatgtcactgcctttgaagcgaaaagtacttccgatgaggcattcttcaaacacaagtgcaggttctgcgcgaaggtctttgggagtgacagtgccttgcagatccacttgcgttcccataccggagagaggccattcaagtgcaacatctgcgggaacaggttctccaccaaggggaatctgaaagtccactttcagcgccacaaagagaaataccctcatatccagatgaacccctatcctgtgcctgagcatttggacaatatccccacgagtactggcatcccatatggcatgtccatccctccagagaagccagtcaccagctggctagacaccaaaccagtcctgcctactctgaccacttcagtcggcctgccgttgcccccaaccctcccaagcctcatacccttcatcaagacggaagagccagcccccatccccatcagccattctgccaccagccccccaggctcagtcaaaagtgactccgggggccctgagtcagccacaagaaacctaggtgggctcccagaggaagccgaagggtccactctgccaccctctggtggcaaaagcgaagagagtggcatggtcaccaactcagtcccgacggcgagcagtagcgtcctgagctccccagcggcagactgcggccccgcgggcagtgccaccaccttcaccaaccctttgttgccgctcatgtccgagcagttcaaggccaagtttccttttgggggactcctggactcagctcaggcatcagagacgtccaagcttcagcaactggtagaaaacattgacaagaaggccactgaccccaatgagtgcatcatctgccaccgggttctcagctgccagagcgccttgaaaatgcactacaggacacacactggggagaggccctttaagtgtaagatctgtggccgggctttcaccacgaaagggaatcttaaaacccactacagtgtccatcgtgctatgcccccgctcagagtccagcattcctgccccatctgccagaagaagttcacgaacgctgtggtcctgcagcagcacatccgaatgcatatgggaggccagatccccaacaccccagtccccgacagctactctgagtccatggagtctgacacaggttcctttgatgagaaaaattttgatgacctagacaacttctctgatgaaaacatggaagactgtcctgagggcagcatccctgatacacctaagtctgcagacgcctcccaagacagcttatcctcttcgcctttgcccctcgagatgtcgagcatcgctgctttggaaaatcagatgaagatgatcaatgctggcctggcagagcagctacaggccagcctgaagtcagtggagaatgggtccatcgagggggatgtcctgaccaatgattcatcctcagtgggtggtgacatggaaagccaaagtgctggcagcccagccatctcagagtctacctcttccatgcaggctctgtccccgtccaacagcacgcaggagttccacaagtcacccagcattgaggagaaaccacagagagcggtcccaagcgagtttgccaatggtttgtctcccaccccagtgaatggtggggctttggatttgacatctagtcacgcagagaaaatcatcaaagaagattctttggggatcctcttcccttttagagaccggggtaaatttaaaaacactgcttgtgacatttgtggcaaaacatttgcttgtcagagtgccttggacattcactatagaagtcataccaaagagagaccatttatttgcacagtttgcaatcgtggcttttccacaaagggtaatttgaagcagcacatgttgacacatcagatgcgagatctgccatcccagctctttgagcccagttccaaccttggccccaatcagaactcagcggtgattcccgccaactcgttgtcatctctcatcaagacagaggtcaacggcttcgtgcatgtttctcctcaggacagtaaggacacccccaccagtcacgtcccgtctgggcctctgtcttcctctgccacatccccagttctgctccctgctctgcccaggagaactcccaagcagcactactgcaacacatgtggcaaaaccttctcctcatcgagtgccctgcagattcacgagagaactcacactggagagaaaccctttgcttgcactatttgtggaagagctttcacgactaaaggcaatcttaaggtacacatgggcactcacatgtggaatagcacccctgcacgacggggtcggcggctctctgtggatggccccatgacatttctaggaggcaatcccgtcaagttcccagaaatgttccagaaggatttggcggcaagatcaggaagtggggatccttccagcttctggaatcagtatgcagcagcgctctccaacgggctggcgatgaaggccaacgagatctccgtcattcagaacggtggcatccctccaattcctggaagcctcggcagtgggaacagctcacctgttagtgggctgacgggaaacctggagaggctccagaactcagagcccaatgctcccctggccggcctggagaaaatggcaagcagtgagaacggaaccaacttccgcttcacccgcttcgtggaggacagcaaggagatcgtcacgagttaaagcagctcgggctggagacatagcattcattcctgttcagaatgcgacctatggtggcctcctactccttgccccccaccccgccccgccccttccttctgttccccagatctatgaactacaacattatgaagacattcttttgtaccttgttcaactttagagttctaagaaagcttatttattagcgatataaccttgctttgcaaacagaatgcaagcgttaactttggtcttctgtattttggactaaatactaattgactagagtgctgtaaacttgctgtaacatttatggcaattgcaagttgccctgctaggcagttgtaatctggcattaacttattttctatatccagtttaatatgaatctggtgttgatgcaatgcctcagtgatgcattagatctctaataaagtctgtatatacatgtacactttgatcctgctggaaaattttatcagcaaacacattgtctaatctttcaaaacagatttaaggaaaggactgaaagtacagactgaacagtgtggttctttgaaaggtttggttttttaatttttattctaaaattcaacctttttttttgtcgatttaaccatttccattttgaactgctatttgtattgtgctttttacttgagtcgtcttcaatgttaataagtttctgtacagtaataagcacgcagaattctttagagaaaaagaaaacaagcgttgttttggtagttgaaactgagacgtaacattttgccttgtaggtatattcacgatagaaaatgtgtgctggaatttcacaatgctgctaagtatagcatcttgaacaaccttcagtggagaaaatgtagatgctcttgtatatacaataagaaatatcactttcattcaaatgtacatatgttccttacaagagcaaatgcttcttcttgatcaagagagcaggtatagtgtttgtttattttgtcttaggtatggaagaaaaaaattggactgttacatgcactttcttggaaagttgaaaggaaagggggggtccaatttctttaacatttaatacttactaacaacagagatactgtaattttactcaagtaatcaaatacattttttttgcaacagataaaacaaaatactgtg

SEQ ID NO: 879 - DNA, 4910 bp, Homo sapiens
gagctgcagaagcgtagggaagaagctgaagaaaaaaagggggcgtctcccctttaaagacttgcaaagattgagagagaaagagagagagtcaagaacagagaatcagagagagagagagagtctgtgtctctgggaaagaagaacatctctgcttcacagtgatttgcgctgggggagaggcatcaattggcttcggacccaagggggagacgagaccaggtcaccccggttaagaccaagtgagcgttgcccctccctctcccaactctctacccgggaatgtctcggcgaaagcagcggaaaccccaacagttaatctcggactgcgaaggtcccagcgcgtctgagaacggtgatgctagcgaggaggatcacccccaagtctgtgccaagtgctgcgcacaattcactgacccaactgaattcctcgcccaccagaacgcatgttctactgaccctcctgtaatggtgataattgggggccaggagaaccccaacaactcttcggcctcctctgaaccccggcctgagggtcacaataatcctcaggtcatggacacagagcatagcaaccccccagattctgggtcctccgtgcccacggatcccacctggggcccagagaggagaggagaggagtcttcagggcatttcctggtcgctgccacaggtacagcggctgggggaggcgggggcctgatcttggccagtcccaagctgggagcaaccccattacctccagaatcgacccctgcaccccctcctcctccaccaccccctccgcccccaggggtaggcagtggccacttgaatatccccctgatcttggaagagctacgggtgctgcagcagcggcagatccatcagatgcagatgactgagcaaatctgcaggcaggtgctgttgcttggctccttaggccagacggtgggtgcccctgccagtccctcagagctacctgggacagggactgcctcttccaccaagcccctactacccctcttcagccccatcaagcctgtccaaaccagcaagacactggcatcttcctcctcctcctcctcttcctcttcaggggcagaaacgcccaagcaggccttcttccacctttaccacccactggggtcacagcatcctttctctgctggaggggttgggcgaagccacaaacccacccctgccccttccccagccttgccaggcagcacagatcagctgattgcctcgcctcatctggcattcccaagcaccacgggactactggcagcacagtgtcttggggcagcccgaggccttgaggccactgcctccccagggctcctgaagccaaagaatggaagtggtgagctgagctacggagaagtgatgggtcccttggagaagcctggtggaaggcacaaatgccgcttctgtgccaaagtatttggcagtgacagtgccctgcagatccaccttcgttcccacacgggtgagaggccctataagtgcaatgtctgtggaaaccgttttaccacccgtggcaacctcaaagtgcatttccaccggcatcgtgagaagtacccacatgtgcagatgaacccacacccagtaccagagcacctagactatgtcattaccagcagtggcttgccttatggtatgtccgtgccaccagagaaggccgaggaggaggcagccactccaggtggaggggttgagcgcaagcctctggtggcctccacaacagcactcagtgccacagagagcctgactctgctctccaccagtgcaggcacagccacggctccaggactccctgctttcaataagtttgtgctcatgaaagcagtggaacccaagaataaagctgatgaaaacacccccccagggagtgagggctcagccatcagtggagtggcagaaagtagcacggcaactcgcatgcaactaagtaagttggtgacttcactaccaagctgggcactgcttaccaaccacttcaagtccactggcagcttccccttcccctatgtgctagagcccttgggggcctcaccctctgagacatcaaagctgcagcaactggtagaaaagattgaccggcaaggagctgtggcggtgacctcagctgcctcaggagcccccaccacctctgcccctgcaccttcatcctcagcctcttctggacctaaccagtgtgtcatctgtctccgagtgcttagctgtcctcgggccctacgccttcattatggccaacatggaggtgagaggcccttcaaatgcaaagtgtgtggcagagccttctccaccaggggtaatctgcgtgcacatttcgtgggccacaaggccagtccagctgcccgggcacagaattcctgccccatctgccagaagaagttcaccaatgctgtcactctgcagcagcatgtccggatgcacctggggggccagatccccaacggtggtactgcactccctgaaggtggaggagctgctcaggagaatggctccgagcaatctacagtctccggggcagggagtttcccccagcagcagtcccagcagccatcaccggaagaggagttgtctgaggaggaggaagaggaggatgaggaagaagaggaagatgtgactgatgaagattccctggcagggagaggctcagagagtggaggtgagaaggcaatatcagtgagaggtgattcagaagaggcatctggggcagaggaggaggtggggacagtggcggcagcagccacagctgggaaggagatggacagtaatgagaaaactactcaacagtcttctttgccaccaccaccaccacctgacagcctggatcagcctcagccaatggagcagggaagcagtggtgttttaggaggcaaggaagaggggggcaaaccggagagaagctcaagtccggcatcagcactcaccccagaaggggaagccaccagcgtgaccttggtagaggagctgagcctgcaggaggcaatgagaaaggagccaggagagagcagcagcagaaaggcctgcgaagtgtgtggccaggcctttccctcccaggcagctctggaggagcatcagaagacccaccccaaggaggggccgctcttcacttgtgttttctgcaggcagggctttcttgagcgggctaccctcaagaagcatatgctcctggcacaccaccaggtacagccctttgccccccatggccctcagaatattgctgctctttctctagtccctggctgttcgccttccatcacctccacagggctctccccctttccccgaaaagatgaccccacgatcccatgagcctgtttttctgtacctgctgctctttgtcccacagagcagaaacagcttcacaaaaggacctcccagagttatgagccctgattttgtctttttctctaagttcttaacatgttatgtccctagtggcttttctgtagtccctgagcttggaaattactgtgcttacaaggggatggccccctaaggaatttttcttccctcctcattctttgtacctgaggaacatagattctctgcagctttctcaaggggaaccctctccagcttccctggtgtgacccttcttccccctcctctctcctctccctttccctttggtaggtgcacctgagcacctacatttggcattgcagcctagccaaaaagggctggcagctgtctctggagggcccagtgccactcctctggggtgacctttctgctcagctggtgggtatgggtcccctatctttctagaaccagtatgtggcattcctgtcaaatggcctgcccatgaagccctggaattccagctccacctccactaccactccaagcctggccccaccagtgctgtttggcctaggaactgtggctgggaaggtgcctccaacaatgggatccagggaagccaaggagaagacagcccccctcctatttcagcctcctgcacccaaggcagtgcctgagaagcccatcatagacaagaagtagcaaactgtacattccttcttcctccccctgctccagaaggtgccggtactgaagatgctccagtaattggtgacccaaccctaggaagtagggagaaatgaaggaagggcataggaaaattttcccagtaaatcccctgatggtcacattaaggtaaaggttttggctggtcagtgtgccaagacctctccagcttctcattcatgatgacctctcaaagttgggaaacaagctgatttcttgccaagaggtctcccaggagatatttgggaaatgtgaagttcgtatctttaaggagcatttttggtcagcatggttgatgaactaatgatgagagagttaaggaatgttgctagaacatagggcttgctggtacctatgtgactaagaaagggacatgatgtaagggaaaaggcctcaaattcttgtgaatgtggacattctcgttaatattcttttgggctaatagtgacatagtgtgcagaggtgtaccagggatcatgggggatttcctagcactagtatgcttctagttttagataactccctcctttattccctggccccttgtattttccttatcttcctctttcaagacccctacccattttgcctatccgtaggctggggcttgtgtctttgtcattgtctggttcttaagagtcccagctccaggtggcgtcctccctgcctctccgtcttgtaatgagttgtagtatttactcttaacataggatcatttggaacaggagttctgaggaggagagagtgagggttttgctattgactgacttgaacgatggcttctcctcaagctgtaggctccagagcttcctaacctagtaaaatgtcaagaacagacgggagatattagtgtctttccctctatcattaaaggtgttttaacc

SEQ ID NO: 880 - DNA, 4775 bp, Homo sapiens
atgtctcggcgcaagcaggccaagccccagcacctcaagtcggacgaggagctgctgccgcctgacggggctcccgagcacgccgccccgggggaaggtgcggaggacgcagacagcgggcccgagagccgcagcgggggcgaggagaccagcgtgtgcgagaaatgctgcgccgagttcttcaagtgggcggacttcctggagcaccagcggagctgcaccaagctcccgcccgtgctgatcgtgcacgaggacgcgcccgcgccgccccccgaggacttccccgagccttcgcccgccagctcccccagcgagcgcgccgaaagcgaggcggccgaggaggcgggtgcggagggcgcggagggcgaggccaggccggtggagaaggaggccgagcccatggacgcggaacccgcgggggacacgcgcgcgccccggcccccgcctgcggcccctgcacccccaacgcccgcctacggcgcgcccagcaccaacgtgaccctggaggcgctgctgagcaccaaggtggcggtggcgcagttctcgcagggcgcgcgcgcggcaggcggctcgggagcaggtggaggcgtggcagctgcagccgtgcccctgatcctggaacagctcatggccctgcagcagcagcagatccaccagctgcagctcatcgagcagatccgcagccaggtggccctcatgcagcgcccgccgccgcggccctcactcagccccgcggccgccccgagcgcaccgggcccggcccccagccagctgcccgggctggccgcgctcccgctgtcggccggggcccctgccgccgccatcgcgggctcgggccccgccgccccggccgccttcgagggcgcgcagccgctgtcccggcccgagtctggcgccagcacccccggcggccctgcggagcccagcgcgcccgccgcccccagcgccgcccctgcccccgctgcccccgccccggcgccagcgccgcagagcgcagcctcgtcgcagccgcagagcgcatccacgccgcctgccctggccccggggtccctgctgggtgcggcgcccggcctgccaagtccgcttctacctcagacttccgccagcggcgtcatcttccccaacccgctggtcagcatcgcggccacggccaacgctctggacccgctgtccgcgctcatgaagcaccgcaagggcaagccgcccaatgtgtcggtgttcgagcccaaagccagcgccgaggacccgttcttcaagcacaaatgccgcttctgcgccaaggtcttcggcagcgacagcgcgctccagatccacctgcgctcgcacacaggcgagcggcccttcaagtgcaacatctgcgggaaccgcttctccaccaaaggcaacctgaaggtgcacttccagaggcacaaggagaagtacccccacatccagatgaacccttacccggtccccgagtacctggacaacgtgcccacctgctcgggcatcccctacggcatgtcgctgccccccgagaagcccgtgaccacctggctggacagcaagcccgtgctgcccaccgtgcccacgtccgtggggctgcaactgccgcccactgtccctggcgcgcacggctacgccgactctcccagcgccaccccagccagccgctccccgcagaggccctcgcccgcctccagcgagtgcgcctccttgtccccaggcctcaaccacgtggagtccggcgtgtcggccaccgccgagtccccacagtcgctcctcggcgggccgcccctcactaaagccgagcccgtcagcctgccctgcaccaacgccagggccggggacgctcccgtgggcgcgcaggctagcgctgcacccacatcggtggacggcgcacccacgagcctcggcagccccgggctgcccgccgtctccgagcagttcaaggcccagtttccgttcggggggctgctagactcgatgcaaacgtcggaaacctcgaagctgcagcagctggtggagaacatcgacaagaagatgacggacccgaaccagtgcgtcatctgccaccgggtgctgagctgccagagcgcgctgaagatgcactaccggacgcacacgggggagcggccgttcaagtgcaagatctgcggccgcgccttcaccaccaagggcaacctcaagacgcacttcggcgtgcaccgtgcaaagccgcccctgcgcgtgcagcactcctgccccatctgccagaagaagttcaccaacgccgtggtcctgcagcagcacatccgcatgcacatgggcggccagatccccaacacgccgctgccggagggcttccaggatgccatggactccgagctggcctacgacgacaagaacgcggagaccctgagcagctacgatgacgacatggacgagaactccatggaggacgacgctgagctgaaggacgcggccaccgacccggccaagccactcctgtcctacgcggggtcctgcccgccctccccgccctcggtcatctccagcattgccgccctggagaaccagatgaagatgatcgactcggtcatgagctgccagcagctgaccggcctcaagtccgtggagaacgggtccggggagagtgaccgcctgagcaacgactcctcgtcggccgtgggcgacctggagagccgcagcgcgggcagccccgccctgtccgagtcctcgtcctcgcaggccctgtcgccggcccccagcaatggtgagagcttccgctccaagtccccgggcctgggcgccccggaggagccccaggaaatcccgctcaagaccgagaggccggacagcccagccgccgccccgggcagcggaggcgcccctggccgcgcgggcatcaaggaggaggcgcccttcagcctgctgttcctgagcagggagcggggtaagtgtcccagcactgtgtgtggtgtctgtggcaagccttttgcttgcaagagcgcgttggaaatccactaccgcagccatactaaggagcggccattcgtctgcgcgctctgcaggcgagggtgctccactatgggtaatttaaaacagcacttactgacacacagattgaaagagctgccttctcagttatttgaccccaactttgctctaggtcccagccaaagcactcctagcctgatctccagcgccgcacccaccatgatcaaaatggaagtgaacggtcacggcaaggccatggcgctgggcgagggtcccccgctgcccgcgggcgtccaggtccccgccgggcctcagacagtgatgggcccgggcctggcgcccatgctggcccccccaccgcgccggacgcccaagcagcacaactgccagtcgtgcgggaagaccttctcctcggccagcgccctgcagatccatgagcgcacgcacaccggcgagaagccgttcggctgcaccatctgcggccgggccttcaccactaagggcaacctcaaggtgcacatggggacacacatgtggaataacgcccccgcgagacgcggccgccgcctgtctgtggagaaccccatggctctcctagggggtgatgccctgaagttctctgaaatgttccagaaggacctggcagctcgggcaatgaacgtcgaccccagtttttggaaccagtatgctgcagccatcactaacgggctcgccatgaagaacaacgagatctccgtcatccagaacggcggcatcccccagctccccgtgagtcttgggggcagcgccctcccccctctgggcagcatggccagtgggatggacaaagcacgcactggcagtagcccacccatcgtcagcttggacaaagcgagctcagaaacagcagccagccgcccattcacgcggtttatcgaggataacaaggagattggtatcaactagccagtgactcgctcatctgccctgcccaggcccacgttttgaagttggagcatcaggcctccgacctttcttgcctcggttctcattacactttcacccatagcagaaaacactttgtgcggctgccgagaggtggtcttgtaagcgctgcatggcgctcccttcaacagcaagcctgactgttctcgagaactctgcaatcttttaaataagcttccttcaaaaaaaaaagtgcttggaaaaccgccttaggaacagaaagagctcagaccatgtccacttcctttctcctgaaacctaataatctctccgagggagaaaggggttctctgcggtattccagtgaaactcatttgatggtttcttttgaattagttagacacttgaacggtgttttttagaactcttcatgttaaagacgtggtttagtactcccaatgctgtgtatcatgacactatcttcgtctgtagtatttatgatgttaagataatgcgggtaacagacaatataatagccccgaccttaaacgaagcttttgtactgcagaatacatctggctgtgtgatttttttttttaagcaagatttgttttactataaataagtggattatttcaatgcaggcaaaattgtgaagttctgttgggaaagatagcatgcttttcgtgtgcaagtacctgtcagtaataagccttttttttttttttttttaatttaaatgtttgtagctgctatgtggacagttgttttctagtgtggtctgtagcccaataactggggaacgagttacagacaaacatcaccgtaaatgactcacaacattataaacagttgtgagaaaatatttcacattatcaaagctgtacaataaa

SEQ ID NO: 881 - DNA, 3487 bp, Homo sapiens
atgcgcgttccggccgaaggggggtaaatttcccaactccaggaatttgtggcggagagggcaaataactgcggctctcccggcgccccgatgctcgcaccatgtcgaggcgcaagcaggcgaaaccccagcacatcaactcggaggaggaccagggcgagcagcagccgcagcagcagaccccggagtttgcagatgcggccccagcggcgcccgcggcgggggagctgggtgctccagtgaaccacccagggaatgacgaggtggcgagtgaggatgaagccacagtaaagcggcttcgtcgggaggagacgcacgtctgtgagaaatgctgtgcggagttcttcagcatctctgagttcctggaacataagaaaaattgcactaaaaatccacctgtcctcatcatgaatgacagcgaggggcctgtgccttcagaagacttctccggagctgtactgagccaccagcccaccagtcccggcagtaaggactgtcacagggagaatggcggcagctcagaggacatgaaggagaagccggatgcggagtctgtggtgtacctaaagacagagacagccctgccacccaccccccaggacataagctatttagccaaaggcaaagtggccaacactaatgtgaccttgcaggcactacggggcaccaaggtggcggtgaatcagcggagcgcggatgcactccctgcccccgtgcctggtgccaacagcatcccgtgggtcctcgagcagatcttgtgtctgcagcagcagcagctacagcagatccagctcaccgagcagatccgcatccaggtgaacatgtgggcctcccacgccctccactcaagcggggcaggggccgacactctgaagaccttgggcagccacatgtctcagcaggtttctgcagctgtggctttgctcagccagaaagctggaagccaaggtctgtctctggatgccttgaaacaagccaagctacctcacgccaacatcccttctgccaccagctccctgtccccagggctggcacccttcactctgaagccggatgggacccgggtgctcccgaacgtcatgtcccgcctcccgagcgctttgcttcctcaggccccgggctcggtgctcttccagagccctttctccactgtggcgctagacacatccaagaaagggaaggggaagccaccgaacatctccgcggtggatgtcaaacccaaagacgaggcggccctctacaagcacaagtgtaagtactgtagcaaggtttttgggactgatagctccttgcagatccacctccgctcccacactggagagagacccttcgtgtgctctgtctgtggtcatcgcttcaccaccaagggcaacctcaaggtgcactttcaccgacatccccaggtgaaggcaaacccccagctgtttgccgagttccaggacaaagtggcggccggcaatggcatcccctatgcactctctgtacctgaccccatagatgaaccgagtctttctttagacagcaaacctgtccttgtaaccacctctgtagggctacctcagaatctttcttcggggactaatcccaaggacctcacgggtggctccttgcccggtgacctgcagcctgggccttctccagaaagtgagggtggacccacactccctggggtgggaccaaactataattccccaagggctggtggcttccaagggagtgggacccctgagccagggtcagagaccctgaaattgcagcagttggtggagaacattgacaaggccaccactgatcccaacgaatgtctcatttgccaccgagtcttaagctgtcagagctccctcaagatgcattatcgcacccacaccggggagagaccgttccagtgtaagatctgtggccgagccttttctaccaaaggtaacctgaagacacaccttggggttcaccgaaccaacacatccattaagacgcagcattcgtgccccatctgccagaagaagttcactaatgccgtgatgctgcagcaacatattcggatgcacatgggcggtcagattcccaacacgcccctgccagagaatccctgtgactttacgggttctgagccaatgaccgtgggtgagaacggcagcaccggcgctatctgccatgatgatgtcatcgaaagcatcgatgtagaggaagtcagctcccaggaggctcccagcagctcctccaaggtccccacgcctcttcccagcatccactcggcatcacccacgctagggtttgccatgatggcttccttagatgccccagggaaagtgggtcctgccccttttaacctgcagcgccagggcagcagagaaaacggttccgtggagagcgatggcttgaccaacgactcatcctcgctgatgggagaccaggagtatcagagccgaagcccagatatcctggaaaccacatccttccaggcactctccccggccaatagtcaagccgaaagcatcaagtcaaagtctcccgatgctgggagcaaagcagagagctccgagaacagccgcactgagatggaaggtcggagcagtctcccttccacgtttatccgagccccgccgacctatgtcaaggttgaagttcctggcacatttgtgggaccctcgacattgtccccagggatgacccctttgttagcagcccagccacgccgacaggccaagcaacatggctgcacacggtgtgggaagaacttctcgtctgctagcgctcttcagatccacgagcggactcacactggagagaagccttttgtgtgcaacatttgtgggcgagcttttaccaccaaaggcaacttaaaggttcactacatgacacacggggcgaacaataactcagcccgccgtggaaggaagttggccatcgagaacaccatggctctgttaggtacggacggaaaaagagtctcagaaatctttcccaaggaaatcctggccccttcagtgaatgtggaccctgttgtgtggaaccagtacaccagcatgctcaatggcggtctggccgtgaagaccaatgagatctctgtgatccagagtgggggggttcctaccctcccggtttccttgggggccacctccgttgtgaataacgccactgtctccaagatggatggctcccagtcgggtatcagtgcagatgtggaaaaaccaagtgctactgacggcgttcccaaacaccagtttcctcacttcctggaagaaaacaagattgcggtcagctaagggagaacttgcgtggaaggagcaatgcagacacagtgaaatctctagaatctgctttgttttgtaagaactcatctcctcctgttttctttttcttactgatatgcaaatgatgtttactacgttggttgtgaccacaacctcaggcaagtgctacaatcacgattgttgctatgctgctttgcaaaaagttgaaaaaataaaaaaaaaatgcataccaaaaa

SEQ ID NO: 882 - DNA, 2318 bp, Homo sapiens
taaagtgtcgagcttctcctcgcgagagacttagtgctcatgctcgctgcaggggtcggaggtcagggcgagcgtctcgcaggccgtaggaggaagatggcggtggagtcgcgcgttacccaggaggaaattaagaaggagccagagaaaccgatcgaccgcgagaagacatgcccactgttgctacgggtcttcaccaccaataacggccgccaccaccgaatggacgagttctcccggggaaatgtaccgtccagcgagttgcagatctacacttggatggatgcaaccttgaaagaactgacaagcttagtaaaagaagtctacccagaagctagaaagaagggcactcacttcaattttgcaatcgtttttacagatgttaaaagacctggctatcgagttaaggagattggcagcaccatgtctggcagaaaggggactgatgattccatgaccctgcagtcgcagaagttccagataggagattacttggacatagcaattacccctccaaatcgggcaccacctccttcagggcgcatgagaccatattaaattctatttactatttgttgaatttatttttccgtcagttatgtaaaataaacatactcttcttcctcccctgattattgccattaagcctttaaattctaaacaaattataatgcatcatctatttaggagttagatttggatgtgctattgtatgattacgaatagtctgtatgtttcaagcccttctgtaaaatatgaagaaaagtgctcttagcattctgtgtaaaactgtactgttaaatatatgtgtgtaatcagcctgagtgtgaaagttaatggaggcctgggaacagggtttatactaagtagtggaggagcgtatggttaagcccaaaggggcagaacaagaaagccacgggattgtatgaaatcaaacatgagtttgtggtgtagactgctgtatgcagttggaaaggacacgtgagagtgagctcaagtggcagcagaggcagtttggaataagctgcggcaagttgaagaagctgtgttggacgagattgccccgccttgatcagggtaccatgacataaaaggttaaagaacaggcaacacaatgagcacttaagtttttaacatgtggggaatagggcattttaaaggctggaaccagttcagaggaaacaagggtttgggtagaggtagaaaggtttaattaaccctggagatctgcaaatggagggaggggtgaaggaggaatcttaagaccgagggagaagagccaaggacaaggtcaggttgaatgagtaggaggtgttcacacatcctcttgtgtgctaggtagtggcgtgcatctgatctgagaggcagtaaagcagtgatgaagacagtgcagcagaacattgaagtcctgattgcagcagtgactctgcaaccttggataaattatttcaatctttattttgtaaaacggagataacggcctataggattgttaagactgaatattttaaaagagcttagaatggtgcctgacaaatgagaaacaataaatactgattattggccataaagtggtattaaaactggatctcttttcttccatggcactactctcattttgaagtttatgaacagtacgacagtgtattgtaaattccctttagtttgttacagtagccaattgaaaatgtatatcccaaaatttaaaaaaaaaagtaccagcagcaataaaattgcactagttttatctggtacatacaaaaacagccatttaaaatctgatgattctgtggaattggtgtccctgttagcaatggcagagaccagcctggagcctagatctggtgcttcttctgtgctgtggtttaccccaaacctttaggttgtttattcattcagattagatagactggagccataaagttaatttgcacctagctttttggagaatagccatgattaactgctattcgtggtgggggtgggggggaaccctatgatttactatgcagatgaagagggtaggaactaaataaaggactttgtaagccaaagtggttgggctgctttgtcaaattccaccctttgcttggttccaacatggaatttctcctttaaagatttcaatatcccatcaaaagtacagttagagaatacctagtgaatttattgaatataatgctaagaatcaaaagacttgtactagtttacctctggctttggtaagtgtggctttgagtaataactgagctgtttccccgcatataaaatagaaataaataagtagtcatcatgacagcaaaaaaaaaaaaaaaaaa

SEQ ID NO: 883 - DNA, 1126 bp, Homo sapiens
tccccatgtgacagtgagcggggtccccgctccaggagacgctcgagtctgcgtcccggccctcagcactgtccactgtttcggtgccagcagagaccagcaggcccgggacagttggtgtttggccgtgccgctgtctaacttggtgtgcagagtgaattgccgctgccggagcggagagaggcggagcggccaggagagaggggatttctgtcagcgccggcctcgggagctcggagacatgaacggcttcacgcctgacgagatgagccgcggcggggatgcggccgccgcagtggccgcagtggtcgctgccgcggccgccgccgcctcggcggggaacgggaccggcgcgggcaccggggctgaggtgccgggcgcgggggcggtctcagcggctgggcccccgggggcggccgggccgggccccgggcaactgtgctgcctgcgggaggatggtgagcggtgcggccgggcggcaggcaacgccagcttcagcaagaggatccagaagagcatctcccagaagaaggtgaagatcgagctggataagagcgcaaggcatctttacatatgtgattatcataaaaacttaattcagagtgttcgaaacagaagaaagagaaaagggagtgatgatgatggaggtgattcacctgttcaagatattgataccccagaggttgatttataccaattacaagtaaatacacttaggagatacaaaagacacttcaagctaccaaccagaccaggacttaataaagcacaacttgttgagatagttggttgccactttaggtctattccagtgaatgaaaaagacaccttaacatatttcatctactcagtgaagaatgacaagaacaaatcagatctcaaggttgatagtggtgttcactaggagacgtggaattgagactaataacttggatgttaacactgtttactgttttttcacatgtagaaatgttctttgtgtattttttctacagaggattttctctgattttattttctttgtttctgactctaataattagttggaaactcatataaaatgagctttcctaaattaaatctattttaaataaaggttattactattaaaaaaaaaaaaaaaaaa

SEQ ID NO: 884 - DNA, 4377 bp, Homo sapiens
agttgtgacggaacgcatgccattataatgagtttttatatctggtgggagcttttacagggtataaaataatgtgaatttagtgtatgtggagattttcctgttatctaagttcccagtttctctttcaatggcaagaaaacgggtttttgataaggcgcgcgccgcgggcagcttctgcctcagcgggtcttcggcggccgcgggaagacccgagagtcattagaagcgcaagatggcgactgcggccgaaacctcggcttcagaacccgaggctgagtccaaggctgggcccaaggctgacggagaggaggatgaggttaaggcggctaggacaaggaggaaggtgttatcgcgggctgtggccgctgcgacatacaagaccatggggccagcgtgggatcagcaggaggaaggcgtgagcgagagcgatggggatgagtacgccatggcttcctccgcggagagctcccccggggagtacgagtgggaatatgacgaagaggaggagaaaaaccagctggagattgagagactggaggagcagttgtctatcaacgtctatgactacaactgccatgtggacttgatcagactgctcaggctggaaggggagcttaccaaggtgaggatggcccgccagaagatgagtgaaatctttcccttgactgaagagctctggctggagtggctgcatgacgagatcagcatggcccaggatggcctggacagagagcacgtgtatgacctctttgagaaagccgtgaaggattacatttgtcctaacatttggctagagtatggccagtactcagttggtgggattggtcagaaaggtggccttgagaaagttcgctccgtgtttgaaagggctctctcgtctgttggtttacatatgaccaaaggactcgccctctgggaggcttaccgagagtttgaaagtgcgattgtggaagctgctcggcttgagaaagtccacagtcttttccggcgacagttggcgatcccactctatgatatggaggccacatttgcagagtatgaagaatggtcagaagacccaataccagagtcagtaattcagaactataacaaagcactacagcagctggagaaatataaaccctatgaagaagcactgttgcaggcagaggcaccaaggctggcagaatatcaagcatatatcgattttgagatgaaaattggcgatcctgctcgcattcagttgatctttgagcgcgccctggtcgagaactgccttgtcccagacttatggatccgttacagtcagtacctagatcgacaactgaaagtaaaggatttggttttatctgtacataaccgcgctattagaaactgcccctggacagttgccttatggagtcggtacctcttggccatggagagacatggagttgatcatcaagtaatttctgtaaccttcgagaaagctttgaatgccggcttcatccaggccactgattatgtggagatttggcaggcataccttgattacctgaggagaagggttgatttcaaacaagactccagtaaagagctggaggagttgagggccgcctttactcgtgccttggagtatctgaagcaggaggtggaagagcgtttcaatgagagtggtgatccaagctgcgtgattatgcagaactgggctaggattgaggctcgactgtgcaataacatgcagaaagctcgggaactctgggatagcatcatgaccagaggaaatgccaagtacgccaacatgtggctagagtattacaacctggaaagagctcatggtgacacccagcactgccggaaggctctgcaccgggccgtccagtgcaccagtgactacccagagcacgtctgcgaagtgttactcaccatggagaggacagaaggttctttagaagattgggatatagctgttcagaaaactgaaacccgattagctcgtgtcaatgagcagagaatgaaggctgcagagaaggaagcagcccttgtgcagcaagaagaagaaaaggctgaacaacggaaaagagctcgggctgagaagaaagcgttaaaaaagaagaaaaagatcagaggcccagagaagcgcggagcagatgaggatgatgagaaagagtggggcgatgatgaagaagagcagccttccaaacgcagaagggtcgagaacagcatccctgcagctggagaaacacaaaatgtagaagtagcagcagggcccgctgggaaatgtgctgccgtagatgtggagcccccttcgaagcagaaggagaaggcagcctccctgaagagggacatgcccaaggtgctgcacgacagcagcaaggacagcatcaccgtctttgtcagcaacctgccctacagcatgcaggagccggacacgaagctcaggccactcttcgaggcctgtggggaggtggtccagatccgacccatcttcagcaaccgtggggatttccgaggttactgctacgtggagtttaaagaagagaaatcagcccttcaggcactggagatggaccggaaaagtgtagaagggaggccaatgtttgtttccccctgtgtggataagagcaaaaaccccgattttaaggtgttcaggtacagcacttccctagagaaacacaagctgttcatctcaggcctgcctttctcctgtactaaagaggaactagaagaaatctgtaaggctcatggcaccgtgaaggacctcaggctggtcaccaaccgggctggcaaaccaaagggcctggcctacgtggagtatgaaaatgaatcccaggcgtcgcaggctgtgatgaagatggacggcatgactatcaaagagaacatcatcaaagtggcaatcagcaaccctcctcagaggaaagttccagagaagccggagaccaggaaggcaccaggtggccccatgcttttgccgcagacatacggagcgagggggaagggaaggacgcagctgtctctactgcctcgtgccctgcagcgcccaagtgctgcagctcctcaggctgagaacggccctgccgcggctcctgcagttgccgccccagcagccaccgaggcacccaagatgtccaatgccgattttgccaagctgtttctgagaaagtgaacgggacgctgggagacaggaaatgccttacttcactctggcccggcggacctcccaccacccagcagtgcactggggatggacaggcctggtgtgctgcgtgctcgcaaccacagatggctcctcggctttagacagaaaggggaaggggttctaagtcaagagcctttcagtgctccctcatattgagggcagtggcagaaaagtgaccactctgcaggctgggcccaggatgtggtgtcctgagatagttttgtatcttaaagactgaggcacagaagcgaaacgagaacacactgtttttgagacacagttgtccaaatgtttctggccagctccggcccctttttgtatgacacttctcttccaccctgcacagcacatgtgcccgtcattcttttaattttaaaagatgaaatggcagatgctagtaattcacagaatggcctcttgtgggggtgggtctgagggaagtcagctataaaacatttgctggagttttgttcaatggggctgtgcatttttatattatgtgtttgtaaatgacatgtcagccattgtttcatgtttcctaaaagcagaatatttgcaacatttgttttgtataggaattatttgtgccacctgctgtggactgttttctttgcctagtgactagtgacctgtgttgtctaaacatgagtttcagccctttggttttgtttaataccatgtcaaatgcaaacttcaattctccccatttagctttattaaactgacgttctcttcaaaacttcttgctgaatggtactcagatgtgcattcacatacagatgtgttttgaagtgggtgtaccttgctttacctaatagatgtgtaaatagaacttttgtaagtcaaatcccattgtcactttgatttaaattattccagctgtgatgtgtcttcattttatagcagtttgacactggagcttttgagcttttttacctcacatcttttatcaaataatatttactgctttgaaaacagcaacagcattggccagttcagtaggggaagcttgctttattaagacactctggagaaagacgtcagggaatccttgtatatgtcgtgggaatcaactcctcatttatctgttgcgtaagtttaagtttttgtgcatcagtcgggttttctatatttttttaacttaacattttttaatataaccgattaaaaagtagacagaacagtaaaataaactcctgtgtgcctaccaaaaaaaa

SEQ ID NO: 885 - DNA, 5423 bp, Homo sapiens
tttctcgctcgctcccgttccccggacgcggcggatgagccggccccgctggggaaggctccgggcggcggcgggcggccgggaggaggctgcgtgctcggggctggggctgcgagcggggtgattttgtattaaaatgaggaggaggaagaagaggcacccacagcggcagcggcggcggcggcggcagcagcagcaggagcagcggcggagagggctgcagcccgggcggacgcgcggagccgagcggggcacggcggcggcagcgacagcggccgggatgagtcaactaataatttaatgggggcagagacggcagcgaggggtagagctagcgagggagagagcgagagaagcagccccgtccggggactcgcgctcacactcacgcacacacacaaacacacacacacctctccctgtgccacccagcaacacccggcctcgtcacaacaacaacagccgcggccgccctctatcctgcccgggggcccagccgaaagccagggcgactctagaggacgctgcccgcccccctctttcatttcgggaaactcctgatcagttttgtcggggtttctgggtttcttttcccccaaagtcctagtgccattgtggtgctcgttgtttacctcggactctggacgagtgagagcttggcgactttttggggggagggggcggggagtttgtcgctgcctaggcggtggaggtggctgggggtgccttctgatcttcctcctcctccccctccccccgaacctcttctctcctcacttgctgggaccccagacgctcacagccccgcgtcaatgggcagggagagggtccttgcggctgttgtcagcgagggcagaatcaaaagtggcattttagtgcctttccggggcttttctcgcgaccccctgccccccaccctcgctgtcccccgctagatgccctcgttgggggtgcgaggctgtggggaaaagtttaaggtttgttaatattagtcgcgattgttggcgaggggggtgggggtgattggaagggaggcgaggtggccttcccaatgcgcgttattcggggttattgaagaataatattgcaagtgacagccagaagtagactttctgtcctcacaccgaagaacccgagtgagcaggagggagggagagacgcgaagagaccttttttcctttttggagaccttgtccgcagtgatttttttttttttaagagaatcctcagtcaccacgtcgtttccccagcaccatcacagtgtacagctcataacgggttttgctttgtttttacgatttccccccaacgaatcacttgtcagatcaattttatcttcttcctcctccctgcttcccactctcccctcctccccatcgcaaaccctgttctctgaggttagacattttacaaacccctatatgttggttttcgaattgtgattttttttttaaacccctttctcatggctactcttctagacgtttatttctgcccttcccccgcttaggggggcgggggtaggggaaaggaaaataatacaatttcaggggaagtcgccttcaggtctgctgcttttttatttttttttttttaattaaaaaaaaaaaggacatagaaaacatcagtcttgaacttctcttcaagaacccgggctgcaaaggaaatctcctttgtttttgttatttatgtgctgtcaagttttgaagtggtgatctttagacagtgactgagtatggatcatttgaacgaggcaactcaggggaaagaacattcagaaatgtctaacaatgtgagtgatccgaagggtccaccagccaagattgcccgcctggagcagaacgggagcccgctaggaagaggaaggcttgggagtacaggtgcaaaaatgcagggagtgcctttaaaacactcgggccatctgatgaaaaccaaccttaggaaaggaaccatgctgccagttttctgtgtggtggaacattatgaaaacgccattgaatatgattgcaaggaggagcatgcagaatttgtgctggtgagaaaggatatgcttttcaaccagctgatcgaaatggcattgctgtctctaggttattcacatagctctgctgcccaggccaaagggctaatccaggttggaaagtggaatccagttccactgtcttacgtgacagatgcccctgatgctacagtagcagatatgcttcaagatgtgtatcatgtggtcacattgaaaattcagttacacagttgccccaaactagaagacttgcctcccgaacaatggtcgcacaccacagtgaggaatgctctgaaggacttactgaaagatatgaatcagagttcattggccaaggagtgccccctttcacagagtatgatttcttccattgtgaacagtacttactatgcaaatgtctcagcagcaaaatgtcaagaatttggaaggtggtacaaacatttcaagaagacaaaagatatgatggttgaaatggatagtctttctgagctatcccagcaaggcgccaatcatgtcaattttggccagcaaccagttccagggaacacagccgagcagcctccatcccctgcgcagctctcccatggcagccagccctctgtccggacacctcttccaaacctgcaccctgggctcgtatcaacacctatcagtcctcaattggtcaaccagcagctggtgatggctcagctgctgaaccagcagtatgcagtgaatagacttttagcccagcagtccttaaaccaacaatacttgaaccaccctccccctgtcagtagatctatgaataagcctttggagcaacaggtttcgaccaacacagaggtgtcttccgaaatctaccagtgggtacgcgatgaactgaaacgagcaggaatctcccaggcggtatttgcacgtgtggcttttaacagaactcagggcttgctttcagaaatcctccgaaaggaagaggaccccaagactgcatcccagtctttgctggtaaaccttcgggctatgcagaatttcttgcagttaccggaagctgaaagagaccgaatataccaggacgaaagggaaaggagcttgaatgctgcctcggccatgggtcctgcccccctcatcagcacaccacccagccgtcctccccaggtgaaaacagctactattgccactgaaaggaatgggaaaccagagaacaataccatgaacattaatgcttccatttatgatgagattcagcaggaaatgaagcgtgctaaagtgtctcaagcactgtttgcaaaggttgcagcaaccaaaagccagggatggttgtgcgagctgttacgctggaaagaagatccttctccagaaaacagaaccctgtgggagaacctctccatgatccgaaggttcctcagtcttcctcagccagaacgtgatgccatttatgaacaggagagcaacgcggtgcatcaccatggcgacaggccgccccacattatccatgttccagcagagcagattcagcaacagcagcagcaacagcaacagcagcagcagcagcagcaggcaccgccgcctccacagccacagcagcagccacagacaggccctcggctccccccacggcaacccacggtggcctctccagcagagtcagatgaggaaaaccgacagaagacccggccacgaacaaaaatttcagtggaagccttgggaatcctccagagtttcatacaagacgtgggcctgtaccctgacgaagaggccatccagactctgtctgcccagctcgaccttcccaagtacaccatcatcaagttctttcagaaccagcggtactatctcaagcaccacggcaaactgaaggacaattccggtttagaggtcgatgtggcagaatataaagaagaggagctgctgaaggatttggaagagagtgtccaagataaaaatactaacacccttttttcagtgaaactagaagaagagctgtcagtggaaggaaacacagacattaatactgatttgaaagactgagataaaagtatttgtttcgttcaacagtgccactggtatttactaacaaaatgaaaagtccaccttgtcttctctcagaaaacctttgttgttcattgtttggccaatgaatcttcaaaaacttgcacaaacagaaaagttggaaaaggataatacagactgcactaaatgttttcctctgttttacaaactgcttggcagccccaggtgaagcatcaaggattgtttggtattaaaatttgtgttcacgggatgcaccaaagtgtgtaccccgtaagcatgaaaccagtgttttttgttttttttttagttcttattccggagcctcaaacaagcattataccttctgtgattatgatttcctctcctataattatttctgtagcactccacactgatctttggaaacttgccccttatttaaaaaaaaaaaagaaaaaaaagagtttgttactctattgtatgttacaaaagaactatagactgtggaatgcagtttaaagatgacatatgccaacaaatgccttgtattatatggcactgccgtaattcaaatttgtttttattttggaaataaaagttcactgtacttttttttcattctcattgttacatgattttttaaaaaaaggaaaagaaaatgtgaaacacaatttagtcctcattatttatttgtagatcctgcagcatcatgttgtaattaattttttggaagtttccgttaaatgtaatattgcttctcttgttaccatactgattcttttctatttataaatgtattttgatgggcagtaaaacaaagtgtcttaaaagttttaaatagagaaaatgtgctttacacagttgcctataaaaagtgctctatgttatccaagcaattcatactataagcttcactcttattgttgtatgcaatttttactatcatgcaaataagcttaggtaaataaaactaatagatcaccttagaaaattatgcaattaatgtgaaaataattgatgtttgcaatgtgtcttcctttggtttacaatcaattttaaagctacatctgtataaaatttctgtataaaggtgtatttcttttttatgagtttatggctatgaaaacagctattttgttacagctggctgtttttataagtgtatcacaattttctttatgcagaaatgttctgactaggagtggttattgactgtaactacacaattaaaattgtttgtatcgtatgacatggtagggtttgtctgcttatgtgaagtaactaaaggagtcaaaggatggccctctcatttaggtgcatgttaataacttgttatttcactgattttaaaaagagcaattgacaagttacttgaaacactgtaaatttaaatcacaaacacatgctcattttt

SEQ ID NO: 886 - DNA, 5306 bp, Homo sapiens
agaggcgcttaagttaccaagggattagggctgatctcaggagaggtaaacgaccatccttggaacacggagcccttcttccctgcccggtatctgcgcgtgccttgggtagtccgcacaaccctccccagctccggatgccctgggatacccggacccaggagagagcgcgtcagcggggcgcagctactttgcactcgccgattctgacacaacagatagttaattggggccttcgaaatcaaggactaagaagtactgaactcctaatatcaccaattcttctaagttcctggacattgatccggaggaggattcgcagttcaacatcaaggtccctgtgcgttttattgcgacctgccggtgggaactttgtctccgagtcggagcagcatggagcggcggagcgagagcccgtgtctgcgggacagccccgaccggcggagcggcagcccggacgtcaaggggcctcccccagtgaaggtggcccggctggagcagaacggcagccccatgggagcccgcgggaggcccaacggcgccgtggccaaggccgtgggaggtttgatgattcctgtcttttgtgtcgtggagcagttggacggctctcttgaatatgacaacagagaagaacacgccgagtttgtcctggtgcggaaagatgtgctttttagccagctggtggagactgcgctcctggccctggggtattctcacagctctgcggcccaggcccaaggaataatcaagctgggaaggtggaaccctctccccctcagttatgtgacagatgcacccgacgcgacagtggccgacatgctacaagatgtctatcatgttgtgacgttgaaaatccaattacaaagttgttcaaagttggaagacttgcctgcggagcagtggaaccatgccacagtccgcaatgccttaaaggaactgctcaaagagatgaaccagagcacattagccaaagaatgccctctctcccagagtatgatttcatccattgtaaatagcacatattatgccaatgtgtcagcaaccaagtgccaggagtttgggagatggtataaaaagtacaagaagattaaagtggaaagagtggaacgagaaaacctttcagactattgtgttctgggccagcgtccaatgcatttaccaaatatgaaccagctggcatccctggggaaaaccaacgaacagtctcctcacagccaaattcaccacagtactccaatccgaaaccaagtgcccgcattacagcccatcatgagccctggtcttctttctccccagcttagtccacaacttgtaaggcaacaaatagccatggcccatctgataaaccaacagattgccgttagccggctcctggctcaccagcatcctcaagccatcaaccagcagttcctgaaccatccacccatccccagagcagttaagccagagccaaccaactcttccgtggaagtctctccagatatctaccagcaagtcagagatgagctgaagagggccagtgtgtcccaagctgtctttgcaagagtggcattcaaccgcacacagggattgttgtctgagattctgcgtaaggaagaagaccctcggacagcctctcagtctcttctagtaaacctgagggccatgcagaatttcctcaatctgccagaagtggagcgagatcgcatctaccaggatgagagggagcggagcatgaatcccaatgtgagcatggtctcctcggcctccagcagtcccagctcctcccgaacccctcaggccaaaacctcgacaccgacaacagacctccctattaaggtggacggcgccaacatcaacatcacagctgccatttatgacgagatccaacaggagatgaaaagggccaaggtgtctcaagccctgtttgccaaagtggctgcaaataaaagtcagggctggctgtgtgaactgctccgctggaaggagaacccaagcccagaaaaccgcaccctctgggaaaacctctgtaccatccgtcgcttcctgaaccttccccagcatgagagggatgtcatctatgaggaggagtcaaggcatcaccacagcgaacgcatgcaacacgtggtccagcttccccctgagccggtgcaggtacttcatagacagcagtctcagccagccaaggagagttcccctcccagagaagaagcgcctcccccacctcctccgactgaagacagttgtgccaaaaagccccggtctcgcacaaagatctccttagaagccctggggatcctccaaagctttattcatgatgtaggcctgtacccagaccaggaagccatccacactctttcggctcagctggatctccccaaacacaccatcatcaagttcttccagaaccagcggtaccacgtgaagcaccacgggaagctgaaagagcacctgggctccgcggtggacgtggctgaatataaggacgaggagctgctgaccgagtcagaggagaacgacagcgaggaaggctccgaggagatgtacaaagtggaggctgaggaggaaaatgctgacaaaagcaaggcagcacctgccgaaattgaccagagataatgtgaacttctactaggcaaagcaatacatcggtccaaggattttctgctttcatttctttaaaagttttttgttagtttgttttttgtttttgtttttgggtttttttggctttatttttgtctttttatgtctgttttgtttttcttacccttttggacatttctttgttgcacaggatacacctatagactgaataagttcagtatttccgaatcagacatcgccttggcaaagacactaaagcgttacactttatcccgtctctatgactggatcatagtcattataatcacaggagactctgccttcattatccttgcacttaacggaagttacatcaggcaagtaccaggatgaaaagaactatgaaataaatgaaggaagctacaagtgtgtgtgtatatgtatatgtatatatctctatatttacatatatatattaaaattgcatgggacagagactttgcaatccgaaagaatagactgtgaaatgagttcttaaagaaaagacttgtttatgtattaaaaaaaccacttcacagtgagtcgctttggctttttgataaactgcggcctgctctcagggtggggtgactatttttgaattcctatttattttttgtgtttgtccctgattttttttttttaattctatggcttcctatctggcagcttaatgggtaatttttgaggtatgtatttaacaaaataaacgacactgccgaaaaaaaaaaaagtgaagtgaaaacaatcagggcacattaaaatgatacaagtcaaataaatcttaaagacacaatgcacacttaaaatgactcaataaaatgacttgctacgttccgttattcaatttgtcattactgtagtgaacagatgcatttctgtggaattccaaataagtaaaactgaaattcagtgcagagaaaactttgtccactagtgcaagtcttgatcaaatgacattttgacattggacatatggaattcatagtatgagccacattttgttgtgaaatttatttacctgcttgtggcttcaaatctgaaaattaataagcctgctcgtttaaaagttgtttgttgttgctgtttttttgtctttttgttttttactagaaaatagttcagtgtaatattaagttagaaaagaagttgctgcccagttaaaggggctccctctcaaataaatctccatccttccctctcccaaaagacatttctgatttctgcttcactttgggcttcctcttcttcgtacacattccatctacctaatcaaacattttcagtccctgatctctcctgtcccttttcctgggatgacagccctaacaagaactgtttttgaatcgttgtgcagctccaggcaatagagtatgtgaagcgatttcagtagaatcacttactcatcctaaaagaaaacattatcccagttacctacatcgcaattaccttatgtaaagcagaactaatgctgactggatgtttaatgggatgagcattaaagctgcaatctactatagtactccagatctctttcggcttcctatgagaaacaccagaagcattactttccacttctacttacagtaattgcaagaggagacctcacattcaggactggcctagtgaacgtaatccatgctttaaactggccattaaacagtcccacatggttggattttttttttttttttgagttgtgctttcacaaaaccttgtcaaagacctcatgcaatatcactttgaaagttattttctgtttactacacaaacattgtaatataactgttaatactatttatatatttgaaaggtataaaaggtaggagttaaaaaaaaaacctctatgtgtagatattaactcagaacttacaatatacagggagaagacatgttgcaatacaagctaattctagctgctcagtaacctctggagtttttaaagggacattttcctgtactttttcaaataatgatgtttaaaaattatcttgacataagcgtcatatacctttgcaaaaggatggttgtttgcagttagccctggccccatccttcctatttctgtagtatgctgcagctttaatcagaaagtccatggttgctgcttcctgatctccgagttactctttccaaattgtcttcttacactgttgctgaaggtcactctgtacacgtaatggaaactgattttgccaagctcttacaaggtggttcatctatcgatggcatccgcatttggtatcttttacacttcaaccaaaaatttattaggtatttttcaatgctaagtcttgccttttattttttaatttcactgccaagtttgcagtggttctaagtgaatctgtgggcattttagcctgtggtcttgccagatctttgcgaattacaatgcatatatgtctatttattcaatatctgtcatataatatctatttggaagaagaaactttctcttgtagtgcctcttgacaaagcacaatttcccgcctttttttttttttgtgaaatgaaaaaaacaaattgtgttttattgcggtatcaacaatgtgaataaggattaacatattgtaaatgttcttttttccatgtaaatcaactatctttgttatcactaagtgataattaatttttaacttatgtgcattgttaggctgttagaattttttggttgttaaaataaacgcattcaataaatatga

SEQ ID NO: 887 - DNA, 3286 bp, Homo sapiens
ctgaggcggcgacgagtggtaggagtcttctttcccctccttcccctttcccttcccttcccgggagaggctgggacccggcaccagggcagtactgtggccgctgcggcctcagctccgactgggtcaggttgcggagactccaggccgcttccagggcgagtactcctgattgtgacatcacattcatcccctgggcgatggagcttgtcactgggaaggaatactcagtcggagaatagccaacaagatgggttactgggagaatctcttcagtggcactgagtggaggcatcagggggttggagccttgtgaacagggaacctgccccccaacacttggaaggacctgggtttcagtgatgagacatggggtatgatgtaacccgtttccagggggatgttgacgaagatcttatctgccctatttgcagtggagtcttggaggagccagtacaggcacctcattgtgaacatgctttctgcaacgcctgcatcacccagtggttctctcagcaacagacatgtccagtggaccgtagtgttgtgacggtcgcccatctgcgcccagtacctcggatcatgcggaacatgttgtcaaagctgcagattgcctgtgacaacgctgtgttcggctgtagtgccgttgtccggcttgacaacctcatgtctcacctcagcgactgtgagcacaacccgaagcggcctgtgacctgtgaacagggctgtggcctggagatgcccaaagatgagctgcccaaccataactgcattaagcacctgcgctcagtggtacagcagcagcagacacgcatcgcagagctggagaagacgtcagctgaacacaaacaccagctggcggagcagaagcgagacatccagctgctaaaggcatacatgcgtgcaatccgcagtgtcaaccccaaccttcagaacctggaggagacaattgaatacaacgagatcctagagtgggtgaactcccttcagccagcaagagtgacccgctggggagggatgatctcgactcctgatgctgtgctccaggctgtaatcaagcgctccctggtggagagtggctgtcctgcttctattgtcaacgagctgattgaaaatgcccacgagcgtagctggccccagggtctggccacactagagactagacagatgaaccgacgctactatgagaactacgtggccaagcgcatccctggcaagcaggctgttgtcgtgatggcctgtgagaaccagcacatgggggatgacatggtgcaagagccaggccttgtcatgatatttgcgcatggcgtggaagagatataagagaactcgactggctatcaggaagagatggaaatcagaaaatcccatcactccagcagctgggacctgagtcctacccaccattcttaatactgtggcttatacctgagccacacatctccctgcccttctggcactgaagggccttggggtagtttgctcagcctttcaggtgggaaacccagatttcctccctttgccatattcccctaaaatgtctataaattatcagtctgggtgggaaagcccccacctccatccattttcctgcttagggtccctggttccagttattttcagaaagcacaaagagattcaatttccctggaggatcaggacagaggaaggaatctctaatcgtccctctcctccaaaaccagggaatcagagcagtcaggcctgttgactctaagcagcagacatcctgaagaaatggtaagggtggagccaaatctctagaaataagtagtgaggccgttaattggccatcactgatggcccttagggaaagactggacctctgtgccaagcagtatccctgttcagcccaccttaaaggtgtaggcacccactgggtctaccagtatgcaggttgggatactgaaaatttccagatgagctcttctttcctacaagttttcataattagggaatgccagggtttagggtaggggttaatctgttgggggttgatgtgtttagcaagaagctactcctagcttttgctaaaatatggttggcactgcctcttgtggcacaggccataattgttccatagacccctctctagccctgtgactgtagttagttactttgataattttctttggccattgtttgtttatatttcacaaactccacctactgcccccccccctcttttttttaagaatggcctgatcatggctatctcagccacattgttggcaatttaatttatttacttcctttttttttttttaagaaaggaaaaaagaaaaaaaaatcaaacttgaaacttttcttttgatgttcctattgtgggggttctggatagggtgggacagggatgggggtgtgttttatattttttccttttcagcacaacctttggctttaatataggaagagccaagggagtcctcggctgaacttacgatatctgccccaaacctctgtaaccccaactgaaatgaggagcttcctctcttcctgtgaaggatatgacagtccagcatcgatgcctgtgccctctggaaaaatttcctcctagcccttccagggccttatcataaaactctggatttagagtattcattttgaaggcaactcccccttccccaagtttccttggagctgtatagctgggttctaagcttcaccatgcaaatcagaaattttatctctaagtacaggctgtgccgtgtctcacccacacccccctggggacttcagttccatttcaggttacctggggtataccttgatccctagagtgactggcagagtaagagaaggggagagataataggtgtgattattttaatatggaggtgggagtgtggttggagatagaaaggctcctccccaccatgtaatggcttcctctcagaattttattccaggctagcttgctgcaggtctgggtagttggatcatggctccactgggattggggtggaaagcttgaggggagtagggttccagctctgggacattgtgctcaggaatttgaaaacgctgctatacttactctggttactacatttcttccactcccctttcccctacctgccttaaccaaggctcatactgtcctgtccttaccctcagatggagccaggaagctcagtgaaaggcttccctaccctttgcactagtgtctctgcaggttgctggttgtgttgtatgtgctgttccatggtgttgactgcactaataataaaccttttactcaactctctaaaaaaaaaaaaaaaaaaaa

SEQ ID NO: 888 - DNA, 5822 bp, Homo sapiens
gatcccaaagatgtgctccacaaatccaggcaaatgggtcacctttgatgatgatcctgctgttcaatcttctcaaaagtcaaagaattttcctctggagaatcaaggtgtctgtagaccaaatggactgaagctgaaccttcctggcctcagggaatttcccagtggatcttcctccaccagcagcactcctctctcctcccccattgtagatttttatttcagtccaggacctccaagtaactctcctctttctacacctaccaaagacttcccaggttttcctggcatccccaaagcagggactcatgtgctttatcctattccagaatcatcttcagacagcccactcgcaatatcaggaggagaatcttccttactgcctaccagaccaacatgtttatcccatgccttgttacccagtgaccactcatgtacacatccaactcccaaagtaggtcttccagatgaagttaatcctcaacaggctgaaagcctaggattccaaagtgatgatctcccccagtttcagtattttcgagaggactgtgctttttcaagtccattttggaaagatgaaggcagtgattcccatttcacccttgacccaccaggaagcaaaaagatgttctcatcaagaaacaaggagatgcctattgaccaaaaaagcctaaataagtgttcactcaactatatctgtgagaagcttgaacatctccagtcagctgagaaccaagactcacttagaagtttgtctatgcactgtctatgtgctgaagaaaatgcctcttcctttgtcccccacacactcttcaggagtcagccaaaatccggatggtctttcatgctgagaattcctgagaagaagaatatgatgtcttcccggcaatggggaccaatttttctgaaagttttgcctggaggaattttgcagatgtattatgaacagggattagaaaaaccatttaaagagatacagcttgatccatattgtaggctttctgaacccaaggttgagaacttcagtgtagcaggaaaaatccacactgtgaagattgaacatgtgtcttacacagaaaaaaggaaataccattctaagacagaagtagttcatgaacctgacatagagcagatgctgaagttggggtccacatcgtaccatgacttccttgactttctgactactgtggaggaggagctgatgaagttgccagctgtttcaaaaccaaaaaagaactacgaggagcaagaaatttccttggaaattgtggacaacttttggggtaaagtcacaaaagaaggaaaatttgttgaaagtgctgtgataactcaaatttattgcctctgctttgtgaatgggaacctggaatgctttttaaccttgaatgaccttgagttgccgaagcgagatgaatcctattatgagaaggactcagaaaaaaaggggattgatattcttgactaccattttcataagtgtgtgaatgtacaagaatttgagcaatcaagaatcattaagtttgtacctctggatgcctgccggtttgagctgatgcgtttcaagactttgtataatggggataatcttcccttttccttgaagtctgtagtggttgtccagggagcatacgtggaacttcaggcttttgtcaacatggcctcattggcgcagaggtcatcctatgctggttccttaaggtcctgtgacaatataaggatacactttcctgtcccatcgcagtggatcaaggccctttggaccatgaacctccagaggcagaagtctctgaaagctaaaatgaaccgccgagcatgtctggggagtttacaggaacttgaatctgaacctgtcattcaagtcactgtggggtcagcaaaatatgagagtgcctaccaggcagtggtatggaagatagatcggcttccagacaaaaattcaagtctagatcatccccattgtctgtcatacaaattagagcttggatcagaccaagaaattccctctgattggtatccatttgctactgttcagttttccgtgcctgacacctgtgcctcaaggacagaggtcaggtctctgggagtggagagtgatgtccagccacagaaacatgttcagcagcgagcttgctacaacatccaggttgaaatagaaaagaagtggattaaaatcgatggagaagacccagataaaattggtgactgcataactcagtaggagtagcaagagtttatgatgacagcccacttgtcaaatatgtaattcaccgaaaccacaccaagtcctgctactgtagagtggaaatgacttctgaatagcggttttaggacaggtctgatggctgtgtttagagaagtttagacctaaaaccgaacaatctgtattttttgcttttcatgtgtttttgtcctaggggttcgatctaaaatgtttctataattcgtgtgatgttttgcttcctattgaaactcaaaggcactgttactcgttgtgtgaccccgcagccagtatgatttttgattactcagtggctgactgttttgctctctggattactgaggtgccgtcttcatttcttcccatctcttcttgctgcttagtgtctgtactagagggtaagggaatcaaaggagacataaaccaaaatagttaattttccctctttcttgcctctgaaatgtggctaggtgtagaatgatgttgaaaccacaggctaaaatgtagatctggaagtatctgtgcttttgaattacttatttacctgtcctcttaccgttggtaaataataattggctatatttggtacctgtctctctcctactgtattgtcattttcaaaatgtgtttgttttctggcgcgtgctgcaaagaagctatttctgttgtcctacatattttagtataaatcactaagacatatttcctttcacttggcaggattcctttcaaaatggaatctgagtattagacactagttaacatatttgtgtatattaaatatgaatttttaaaatttataaatactattttccaaaagtacagactctaaggacatattttgataaagtattatttgtaatgaacacaagcctctcttgagtagaagtctaaatcacattatgattattttatactagttctgctatcatgctgttttatgctaattctgcttattttagagtatttttcattaaaaggtgagcaaagtgaaagatacttggtattttacccagatttctaagtggcaacatttttattcttcagagtcaggtaaatgactataatagtttggtttctaatgaaaagtcaatagcattagcagttataattctgtttataatttcctttcagcatttacagtgaaaagtgagaattttaaaatttatgaaatctatattccaggtattgtttttagtctgaaaaacaaactcccccatgtggtattaatataccttcaatttatgttgagtcttaaacataattaggagatatttttctctatttgctagatttgttttgagtcaaaactgatttagtgttcttccaaacaacatttatgtgttggcctacagagtttatttcatgtgttttttttaatatttaatattatattacattcattgaaatctgttcaaaaacagattaagacaaacatttatgatggtctgtatcaatcagcagattttattgcttttcattattttactgtaaaggcaaagaatgcaataggtgatggttggttgaaaggaattgttattgctgtttttattttttactttttttgagacagagtctcactctgttgcccagcctggagtgcagtgtgtcatcttggctcactgcaacctccgcctcctgggttcaagggattctcctgcctcagcctccaactagctgggattacaggcacaagccaccatgcctggctaaaattcttttgtatttttactacagacggagtttccccatgttggccgggctagtctcgaactcctgacctcaggtgatccaccagcctcggcctcccaaagttctgggattaaatgcgtgagccaccatgcccggccgctattgctctttttaacttcatttgatgccttgcttataatatcatatgcttgaggctcactgttgatgtagagtagggcaaatctgtgtgtgtatgtcattaaaaaaattctaccatctttctttatcatctggtgtgggcgcactctacagtgacttcagtctgctcagaacgaatgtggaggccggccgaaactgatgctgcccacagtcccagtgaagttaggtgggttaattactgccattcctttctaagtgtgttttatggcatcctgcccacaaagaactcacagtctgattaggatgaacttaatgactatttacacctcaaaatatattcagcaaagggttcacttagttgcccctcatgcttcacaggttgactagtatctgtgggtacctccctgcccaggttattcactcacaagccaccgggccttcaggacatctcaagattcagtcttgacaatataatagcaaaagctggactaaagcccaaatggattgtctgtggcaatgcagaagctgatagcattaacagcagggtgttacagcataattgttaattcgcacatctattaggatccttaaatattcattacttaatgttaaattaacattctgtgtagggaggggaggcttattcaattcttctgacctcagaactggcagaaggtcagatgtgactacagaactctaggtgaaaaatcaggtagggttcaaattaagtagaactgcccttgccggaatagtgatcttcaaaaaacccttgcttttaggggagggaagcggggaaggaaaggaatgagggaggaaatattcctttctagcattcattttgcttagatcactccattgtgagtttgaccattttggagtcaaatgagcagacttccaaggagttgaccagtttgtgactagtctggtcacctttccagttacaggatcatattaactgtgtaaatgaattcatgggtagatgatttgtgcagatctgaatttaagaacatttcctttttctgtgggaatcacaagagtttatccactaaaaaaagatatgtaaaaaagatactttccagcacataaataaaggctggaattttacaacctgatgtatatattagacagttctaggatgttagttcccttcattccagagctatgcttgtgatacagccccttttcttataaagtcagttagaaggacttccttaacaatgactattataatgtcttacttaaaatacagttttgtattctgtcaatgcaaatataagacaggttgagccttaatcatgtaacaaaatattttgtagattacatattgatttttcaaaaattaaaaatgtatttcaaactattcttactgtgctgtgaatttatatcttcttctgcaagacctggggctatttttttttcttaaggtatgaaatcaatttcaataaccttaaacaattgaccctctgtcaggcatatgtcaggctccactcttaaggagtcagtgaccatgacctctttgcatatcctggaaaaatgacatcatcaaagtatagttgataatgttataaaggatgattttaaaaatagggtataatcatgactcacaaagatatgaggctgggtgtggtggctcacgcctgtaatcccagctctttgggaggctgaagcgggtggatcatgaggtcagaagatcaagaccatactggctaacacggtgaaaccccgtctctactaaaaatacaaaaaaaaaaaa

SEQ ID NO: 889 - DNA, 3352 bp, Homo sapiens
gtctccttgcggccggcggggtgctgggttcccgtctgctgcctctcggagagtcccgggtgactgccgcaggctccatcgccctgtggcctgcaggtattgcgagatttatagggaggacgctgggacccccaaaagctgggaaatgggactattggcattcagggatgtggctctagaattctctccagaggagtgggaatgcctggacccagctcagcggagtttgtatagggatgtgatgttagagaactacagaaacctgatctcccttggtgaggatagcttcaatatgcaattcctatttcacagtcttgctatgtctaagccagaactgatcatctgtctggaggcaaggaaagagccctggaacgtgaacacagagaagacagccagacactcagttttgtcttcttatcttactgaagacattttgccagagcagggcctgcaagtttcattccaaaaagtgatgctgagaagatatgaaagatgttgtcttgagaaattacgcttaaggaatgactgggaaattgtgggtgagtggaaagggcagaaggcaagttataatggacttgacctatgctcagcaactactcatagcaaaaactttcaatgcaataaatgtgtgaaaggttttagtaaatttgcaaatctaaataaatgtaagataagccatactggagaaaaaccattcaaatgcaaagaatgtggcaatgtctcttgcatgtctttaataatgactcaacagcagagaatccatattggagagaacccgtaccaatgtaaaaaatgtggcaaagcctttaatgagtgctcatgctttactgactgtaagagaattcatgttggagagaaacattgcaaatgtgaagaatgtaataacatttttaagtcttgctcaagtcttgctgttgttgagaaaaatcatactgaaaagaaaacctacagatgtgaagaatgtggcaaagcttttaacctgtgctcagttcttactaaacataagaaaattcatactggagagaaaccatacaaatgtgaagaatgtggcaaatcctttaagttgttcccataccttactcaacacaagagaattcatagtagagagaaaccctacaagtgtgaagaatgtggcaaagtctttaaattgttgtcataccttactcaacatagaagaattcatactggagagaaaaccttccgatgtgaagaatgtggaaaagcctttaaccagagctcacatctgactgaacataggagaattcatactggtgagaaaccatacaaatgtgaggaatgtggcaaagcttttacctggttctcataccttattcagcataagagaattcatactgggcagaaaccctacaaatgtgaggaatgtggcaaagcttttacctggttttcataccttactcaacataagagaattcatactggagagaaaccctacaaatgtgatgaatgtggcaaagcttttaactggttttcatatcttactaatcataagagaattcatactggagagaaaccctacaaatgtgaagaatgtggcaaagcctttggccagagctcacacctttctaaacataagacaattcataccagagagaaaccatacaagtgtgaggaatgtggcaaagcctttaaccactctgcacaacttgctgtacatgagaaaactcatacctgagaaaaaccctacaattctaaacaatatggcatagtctttaatacctattcacaacttcacagcagaatatttttactgaataagagtgttacaaatgtaatgactgtcaaaaggccatttacagtctatgagcctttgagtgcactaaaatgtttaggctacgaacaatacaaatagaccggttcaacacctccacttatatcacagctcttactgtacacagaagaatttatactggagggaaaccctccagttgctcaaactgtattcaatttcaaagactttgtattggagagaaaccctacaaatgtaataaatgcagaaacaacatttgttcaaaaaatatacctcagaaaacaccagagtgttcacactaaaaactgttttacagatgcagtaaatgtgaaaaaatgtctaatcaaaaattacatcaaaacacatccaagaattcatagtaaaaagcactaagtcactgacactttcagacattactgtaaatctgagtgttggttatagagaataattcaaagttaagttaaagtaagtaggagattcaccttttggggaagttataattacatttcaagtataccttttggtgccaggcacggtggctctttcctatagttgctgcacttttggatgccgaggtcgggggattgcttgagcccaggagtttgggaccaggctgggcaacatggcaaaacctcatctctacaaaaagtaaaataaaagccaggcttggtggcacatgcctgttgtcccagctacttggaaggctcaggtgggaggattgcttgagcctggaggttgaggatgcagtgagctgctatctggcaacttcactcctgcctgggcaacagagcaagaccctttctcaataataataataacaacataataataaagtatactcggtgcactgaaagagttttagcttttttgaaaatcacatatttatgtaattcaagtcttaaatcacttgataccatgccttcatttctagtgtttatgtgaaggcatgaggcctactgttgctacatgaaagctgtgagagtttcttctatattcgggtgggtgttgttcatatccttttctttggaagattatggacattgcattgtaagcttcctgaagaaatttaactggagaggctctttgtacttgtcttataatagggttgtaagtgattcatgagataggtcttcagagtactattctgcattatatttaagaaagaaacatttgagttttacaagtcagttgtttttcctattgcacattaaggtaataaaattcagtggattttgaaatgctctttttagactgtttgaacttaatttgttttaataagacattgttttaatgtctttggaccgttgtacattaagtgatgcgtatcctaccaccaacgttaacctatctcaccttagttacggttgtaggtaacaaatggtaacaatacaatagtgggtaacatggtggaatagtatctctaatgatcccttctcccagtggcattaaacttcaaataatttgaaaaatattgttcccacacgttacaccttcattctgtttgctctttttgtaatgacagtgtcattattaaggctataataaagcctatataggattataatcaaaaaaaaaaaaaaaaaa

SEQ ID NO: 890 - DNA, 4712 bp, Homo sapiens
acccccgagaaagcaacccagcgcgccgcccgctcctcacgtgtccctcccggccccggggccacctcacgttctgcttccgtctgacccctccgacttccggtaaagagtccctatccgcacctccgctcccacccggcgcctcggcgcgcccgccctccgatgcgctcagcggccgcagctcctcggagtcccgcggtggccaccgagtctcgccgcttcgccgcagccaggtggcccgggtggcgctcgctccagcggccggcgcggcggagcgggcggggcggcggtggcgcggccccgggaccgtatccctccgccgcccctcccccgcccggccccggcccccctccctcccggcagagctcgcctccctccgcctcagactgttttggtagcaacggcaacggcggcggcgcgtttcggcccggctcccggcggctccttggtctcggcgggcctccccgccccttcgtcgtcctccttctccccctcgccagcccgggcgcccctccggccgcgccaacccgcgcctccccgctcggcgcccgcgcgtccccgccgcgttccggcgtctccttggcgcgcccggctcccggctgtccccgcccggcgtgcgagccggtgtatgggcccctcaccatgtcgctgaagccccagcagcagcagcagcagcagcagcagcagcagcagcagcaacagcagcagcagcagcagcagcagcagccgccgcccgcggctgccaatgtccgcaagcccggcggcagcggccttctagcgtcgcccgccgccgcgccttcgccgtcctcgtcctcggtctcctcgtcctcggccacggctccctcctcggtggtcgcggcgacctccggcggcgggaggcccggcctgggcagaggtcgaaacagtaacaaaggactgcctcagtctacgatttcttttgatggaatctatgcaaatatgaggatggttcatatacttacatcagttgttggctccaaatgtgaagtacaagtgaaaaatggaggtatatatgaaggagtttttaaaacttacagtccgaagtgtgatttggtacttgatgccgcacatgagaaaagtacagaatccagttcggggccgaaacgtgaagaaataatggagagtattttgttcaaatgttcagactttgttgtggtacagtttaaagatatggactccagttatgcaaaaagagatgcttttactgactctgctatcagtgctaaagtgaatggcgaacacaaagagaaggacctggagccctgggatgcaggtgaactcacagccaatgaggaacttgaggctttggaaaatgacgtatctaatggatgggatcccaatgatatgtttcgatataatgaagaaaattatggtgtagtgtctacgtatgatagcagtttatcttcgtatacagtgcccttagaaagagataactcagaagaatttttaaaacgggaagcaagggcaaaccagttagcagaagaaattgagtcaagtgcccagtacaaagctcgagtggccctggaaaatgatgataggagtgaggaagaaaaatacacagcagttcagagaaattccagtgaacgtgaggggcacagcataaacactagggaaaataaatatattcctcctggacaaagaaatagagaagtcatatcctggggaagtgggagacagaattcaccgcgtatgggccagcctggatcgggctccatgccatcaagatccacttctcacacttcagatttcaacccgaattctggttcagaccaaagagtagttaatggaggtgttccctggccatcgccttgcccatctccttcctctcgcccaccttctcgctaccagtcaggtcccaactctcttccacctcgggcagccacccctacacggccgccctccaggcccccctcgcggccatccagacccccgtctcacccctctgctcatggttctccagctcctgtctctactatgcctaaacgcatgtcttcagaagggcctccaaggatgtccccaaaggcccagcgacatcctcgaaatcacagagtttctgctgggaggggttccatatccagtggcctagaatttgtatcccacaacccacccagtgaagcagctactcctccagtagcaaggaccagtccctcggggggaacgtggtcatcagtggtcagtggggttccaagattatcccctaaaactcatagacccaggtctcccagacagaacagtattggaaatacccccagtgggccagttcttgcttctccccaagctggtattattccaactgaagctgttgccatgcctattccagctgcatctcctacgcctgctagtcctgcatcgaacagagctgttaccccttctagtgaggctaaagattccaggcttcaagatcagaggcagaactctcctgcagggaataaagaaaatattaaacccaatgaaacatcacctagcttctcaaaagctgaaaacaaaggtatatcaccagttgtttctgaacatagaaaacagattgatgatttaaagaaatttaagaatgattttaggttacagccaagttctacttctgaatctatggatcaactactaaacaaaaatagagagggagaaaaatcaagagatttgatcaaagacaaaattgaaccaagtgctaaggattctttcattgaaaatagcagcagcaactgtaccagtggcagcagcaagccgaatagccccagcatttccccttcaatacttagtaacacggagcacaagaggggacctgaggtcacttcccaaggggttcagacttccagcccagcatgtaaacaagagaaagacgataaggaagagaagaaagacgcagctgagcaagttaggaaatcaacattgaatcccaatgcaaaggagttcaacccacgttccttctctcagccaaagccttctactaccccaacttcacctcggcctcaagcacaacctagcccatctatggtgggtcatcaacagccaactccagtttatactcagcctgtttgttttgcaccaaatatgatgtatccagtcccagtgagcccaggcgtgcaacctttatacccaatacctatgacgcccatgccagtgaatcaagccaagacatatagagcagtaccaaatatgccccaacagcggcaagaccagcatcatcagagtgccatgatgcacccagcgtcagcagcgggcccaccgattgcagccaccccaccagcttactccacgcaatatgttgcctacagtcctcagcagttcccaaatcagccccttgttcagcatgtgccacattatcagtctcagcatcctcatgtctatagtcctgtaatacagggtaatgctagaatgatggcaccaccaacacacgcccagcctggtttagtatcttcttcagcaactcagtacggggctcatgagcagacgcatgcgatgtatgcatgtcccaaattaccatacaacaaggagacaagcccttctttctactttgccatttccacgggctcccttgctcagcagtatgcgcaccctaacgctaccctgcacccacatactccacaccctcagccttcagctacccccactggacagcagcaaagccaacatggtggaagtcatcctgcacccagtcctgttcagcaccatcagcaccaggccgcccaggctctccatctggccagtccacagcagcagtcagccatttaccacgcggggcttgcgccaactccaccctccatgacacctgcctccaacacgcagtcgccacagaatagtttcccagcagcacaacagactgtctttacgatccatccttctcacgttcagccggcgtataccaacccaccccacatggcccacgtacctcaggctcatgtacagtcaggaatggttccttctcatccaactgcccatgcgccaatgatgctaatgacgacacagccacccggcggtccccaggccgccctcgctcaaagtgcactacagcccattccagtctcgacaacagcgcatttcccctatatgacgcacccttcagtacaagcccaccaccaacagcagttgtaaggctgccctggaggaaccgaaaggccaaattccctcctcccttctactgcttctaccaactggaagcacagaaaactagaatttcatttattttgtttttaaaatatatatgttgatttcttgtaacatccaataggaatgctaacagttcacttgcagtggaagatacttggaccgagtagaggcatttaggaacttgggggctattccataattccatatgctgtttcagagtcccgcaggtaccccagctctgcttgccgaaactggaagttatttattttttaataacccttgaaagtcatgaacacatcagctagcaaaagaagtaacaagagtgattcttgctgctattactgctaaaaaaaaaaaaaaaaaaaaatcaagacttggaacgcccttttactaaacttgacaaagtttcagtaaattcttaccgtcaaactgacggattattatttataaatcaagtttgatgaggtgatcactgtctacagtggttcaacttttaagttaagggaaaaacttttactttgtagataatataaaataaaaacttaaaaaaaatttaaaaaataaaaaaagttttaaaaactgaaaaaaaaaaa

SEQ ID NO: 891 - DNA, 916 bp, Homo sapiens
ggacgcagagaagccagagactttcgcttccggctgccgcaggcgcttcgctggtgcaggtaagctccgcacactctcggccggtcccgagtccgactccctcaagggtgacgcgagctctgccctttaaccggaaacgtctccctgctcaccccacccccgcgcagacgcagtgctgagcacacagctaccggacaaagagtgacgcccggagctggagttatggcggctacggagccgatcttggcggccactgggagtcccgcggcggtgccaccggagaaactggaaggagccggttcgagctcagcccctgagcgtaactgtgtgggctcctcgctgccagaggcctcaccgcctgcccctgagccttccagtcccaacgccgcggtccctgaagccatccctacgccccgagctgcggcctccgcggccctggagctgcctctcgggcccgcacccgtgagcgtagcgcctcaggccgaagctgaagcgcgctccacaccaggccccgccggctctagactcggtcccgagacgttccgccagcgtttccggcagttccgctaccaggatgcggcgggtccccgggaggctttccggcagctgcgggagctgtcccgccagtggctgcggcctgacatccgcaccaaggagcagatcgtggagatgctggtgcaagagcagctgctcgccatcctgcccgaggcggctcgggcccggcggatccgccgccgcacggatgtgcgcatcactggctgagcggtggagctgcgggcggccagggccgggcgctctgtgcggactggggccatgatcgggcccgggggcctgagcctgggaccccaccccgtgttaatgaaaaatgagttttggcagcgccaaaaaaaaaaaaaaaaaaaaaaaaaaaaaaaaa

SEQ ID NO: 892 - DNA, 3353 bp, Homo sapiens
tccggtgctcagtggctagccgaatagccgtgtttgggacctgggctcgggcttcttgcgtccccgctaagaacatgtcacggggccgaatcgtccgtattctctcagcttcaagctcctctacttttcaaccaggtcactagcccttgactcctcttatcaaacttccggaactgccaccccaccagtgactccacaggcaccagggcatgcaacagggctgggacaggaaggctctcttcttcacctcaagcctgctgggctaacacttgcgatttttactagagttaactttgtaatgtatgtctctgactctagaatttcaagagaagttccacttagtgactcctaagtggaagttctaagatggcttcccagtgaggtgatgaagaggtttgagctttagagtgcggttgcaaagctcttctctgacctgaacaatggctgtagctgtggaccaacaaatccagactccttcagtacaagatctccaaatagttaaactggaagaagattcccactgggagcaggaaatttcccttcaagggaattaccctggaccagagacatcctgccagagcttttggcatttccgttaccaagaagcatcacgaccccgagaggccctcctccagctccagaagctctgttgtcagtggctaaggccagagaagtgtacaaaagagcagatcctggagttgctggtcctagaacagttcccgactgtccttctccaggagatccagatctgggtcagacagcagcatccggagagtggagaggaggcagtggccctggtggaagacttgcagaaagaacctggaagacagaggctggagcctcgggcgaggccgtccggccgcacccctcctgctcagctgcggtcgccatggccaatgacagctgcgggcccggcgagccgagctcgagcgagcgagaccggcagtactgcgagctgtgcgggaagatggagaacctgctgcgctgcagccgcagctccttctgctgcaaggagcgccagcgccaggactggaagaagcacaagctcgtgtgccagggcagcgagggcgccctcggccacggagggggccctcaccaggactccggccccgcgccgcccgctgcagcgccgccgtccagggaccgggccctggaggccaggaaggcagcgaggcgccgggacagcgcctccggggacgcagccaaggcaaaggccaagtccgcggccgaccccgcggcggccgcgtccccgcctcgcgcgtccccgggccggacaaaagccatggctgcttgttatccggtcaatggaacgggttatgtacgtcatgttgataatccaaatggagacggaagacgtgtgaaatgtattacattacgttaaagaacgggatgccaaggtaagtggaggtatacttcgaatttttctagaaggtaaagcctagtttgctgacattgaacccaaatttgatagactgctgtttttctggtctgaccatcgcaaccctcatgaagtacaaccagcatatgctacaaagtacgcaataactgtttggtatttgatgcagatgagagagcacgagctaaagtaaaatatctaacaggtgaaaaaggtgtgaggattgaactcaataaaccttcagattcagtcagtaaagacgtcttatagagcctttgatccagcaataccccacttcacctacaataattgttgacgctatttgttaatttgtgaatacgaataaatgggataaagaaaaatagacaaccagttcgcattttagtaaggaaacaaacaactttgtgtgttgcatcaaacagaagattctgactgctgtgactttgtaccgcatgatcaacttagaatctgtgattgcttacaggaagaagataagctactaatagaaaatgtttttacctctggatatgaaataagtgccctgtgtagaatttttttcattcttatattttgccagatctgttacgtagctgagttaatttcatctctacttttttaatatatgtcaagtttgaattggaataatttttctatgattaggtacaatttatcaaaactgaattgagaaaaaattacagtatttctcaaaataacgtcaatctatttttgtaaacctcttcatactattaaattttgccctaaaagacctcttaataatgattgttgccagtgactgattaattttattttacttaaaataagaaaaggagcactttaattacaactgaaaaatcagattgttttgcagtccttcctatcttacactaatttgaactcttaaagattgctgcttttttttgatattgtcaataatgaaacccaattgtaaaacagtcaccatttactaccagtaacttttagttaatgtcttacaaggaaaaagacacaataagaagagtttaattttttttttttttttgacctgggcgacagagtgagactccgtctcaaaaaaaaaaaaaaaaagaaatgtttcattttggtttttcaccaaccttcctttgataggacaaagcagatactaagagggggaggaaaggctgttctgtgtctgaacccagttgggctagtccccaagaggagctgagagccatgtactctaatgcctcccttttcttcccccagccctgcctgatgtggctctgggaattcctgcagagaagagcaggggtggccaggagatagtgagcagctcccaggaggcatggagggatccagaacctggactgaagaaccacctagaaataactcagcagaattctgaaaatgaggtcacgctgggtaagaatgcctttttttttttttcatagtcaaagttagctatggagtttctgtagtattcactactccagacctttttcaagttgaattttttttctttttccctatgtctgttcttacgtattttttttaaacttttatttcagtagtgtttggggaacaagtagtgtttggttgcatggaaaagttcttcagtggtgatttctgagattttggtgcacccatcacccaagggtagtcttttttatccatcaagtctgtacccaatgtgtagtctttgtttttttcttttttttttttttgagactgagtctcattctatcacccaggctggagtggagtggtatgatcttgactcactgcaacatctgcctcccgggttcaagtgattctcctgcctcagcctcctgagtcgctgggattactgtgatcatgccactgcattccagcctgggcgacagagtgagacccagactcagctgaaaaataataatattattaaaagaatttaaaataaagtgttccatagatgtgaaaaaaaaaaaaaaaaaaaaaa

SEQ ID NO: 893 - DNA, 3293 bp, Homo sapiens
cccgcgtctccgctccctccctgcgcagcggaaacatggcggcgggaagagagtgagccgccccgcgcccccgccgcgccctcagatggagaaattagcatacaaagaaactgacttgtcagaagtcagagcaaggtattggtggatccagggataaatcccaaacttcttaacccctagaccggtttttagtccattgactatgcagcctaatgtgatagactggagtgatgttagaaaacacaaatatggtcacctatcagagtctgcatcccaatatcaagaagctgctgacatcctggatctagggttgtaaagaagattacatgagctaatggatgtgaaaacatcttaaaaactctcaaatacttttcaactttggaggattattatgattttcattctgttcagcggctatactcagactttactctaaaagtcaaatcttctgacattctttgaagtgaagcattctatgaatgtgagctgaagaaatgaatgaaatgaaataatgcagtcctacacacctccaagcaacgagttcaagatcagtatgaaattggaagcacaggaccccaggaacaccacatccacctgtattgccacagtagttggactgacaggtgcccgccttcgcctgcgccttgatgggagcgacaacaaaaatgacttctggcggctggttgactcagctgaaatccagcctattgggaactgtgaaaagaatgggggtatgctacagccacctcttggatttcggctgaatgcgtcttcttggcccatgttccttttgaagacgctaaatggagcagagatggctcccatcaggattttccacaaggagccaccatcgccttcccacaacttcttcaaaatgggaatgaagctagaagctgtggacaggaagaaccctcatttcatttgcccagccactattggggaggttcggggctcagaggtgcttgtcacttttgatgggtggcgaggggcctttgactactggtgccgcttcgactcccgagacatcttccctgtgggctggtgttccttgactggagacaacctgcagcctcctggcaccaaagttgtgattccaaagaatccctatcctgcctccgatgtgaatactgagaagcccagcatccacagcagcaccaaaactgtcttggaacatcaaccagggcagagggggcgtaaaccaggaaagaagcggggccggacacccaagaccctaatttcccatcccatctctgccccatccaagacagctgaacctttgaaattcccaaagaagagaggtcccaaacctggcagcaagaggaaacctcggactttgctgaacccaccacctgcctcaccaacaaccagcactcctgaaccggataccagcactgtaccccaggatgctgccaccatccccagctcagccatgcaggccccaacagtttgtatctacttgaacaagaatggcagcacaggcccccacttagataagaagaaggtccagcaactccctgaccattttggaccagcccgtgcctctgtggtgttgcagcaggctgtccaggcctgtatcgactgtgcttatcaccagaaaaccgtcttcagcttcctcaagcaaggccatggtggtgaggttatctcagccgtgtttgaccgggaacagcataccctcaacctcccagcagtcaacagcatcacctacgtcctccgcttcctggagaaactctgccacaaccttcgtagtgacaatctgtttggcaaccagccctttacacagactcacttgtcactcactgccatagagtacagccacagccacgacaggtacctaccaggtgaaacctttgtcctggggaatagtctggcccgctccttggaaccacactcagactcaatggactctgcctcaaatcccaccaaccttgtcagcacctcccaaaggcaccggcccttgctttcatcctgtggcctcccaccaagcactgcctcagctgtgcgcaggctatgctccagggggtcggaccgatacctggagagccgcgatgcctctcgactgagtggccgggacccctcctcatggacagtcgaggatgtgatgcagtttgtccgggaagctgatcctcagcttggaccccacgctgacctgtttcgcaaacacgagatcgatggcaaggccctgctgctgctgcgcagtgacatgatgatgaagtacatgggcctgaagctggggcctgcactcaagctctcctaccacattgaccggctgaagcagggcaagttctgaaccaggagaggcagcctagacaaccaagtggcagcaggtgggggcattcttctaggaatgaggggcatcagcccaccccaggcacctcagtggggttccgggccacctcaggactccaagaggctgtgtggagccaccactcctagccacagctgccatgataagtccttccatgaaggactgaggagggagagtgggggtccagggctggtgctgctcttccctcagctctgccggggctctaaggtccctctatttatttctcaaccctggctggcctctcaccaggagtttaggctgaatgccttccacgtgatggaggaaaaggccaactctgtcctggtcttgctgtggcaccccatcgccccacagctcgtaccttctcaccagattcccctgaatccaaactcgtggtgcaaacctctaccttttttacaaaaagatcttattgttaatttattgtttctggcacttgggcaaaccctgtagttaatactcctcccacactagacactgggtttcaggaggagggagactgccctgctttggtcccagagaggccctctgcagataggcgtggcccctcttcagaggacactaccctagggcactttctctttgaggtggagagacccataaagccttgaccacatcactccatatggggaggagaaggatccctgtcaccttctcctctcttcacggggcccttttgcagccctaggcctcatctgtgggaagggagtccctggcttatactgcccccaccacagctccttgccctggccagaactgctgtcgaagaaaatcaggccggaaggccaagaaggcgctaagggggatgggagggcaggttttccaggctggagtcggttccacccactcgcctgtccacaggcttccttgtaagcaagtcagcagcacagctactcacgctgccatctggacttattttatgtcaatctgtttataaataaaaaccaatatagataccaaaaaaaaaaaa

SEQ ID NO: 894 - DNA, 2842 bp, Homo sapiens
gtcgcgggagctctctgatccactcaggggtcagggcatcactggtctcgcgtgcgcgtgaccaggcccggtttccggtgccaggacctttccgaagcgtcgagtggcctaacggtcacagctgtcgcccatcggagaggcaggactactgcgagcagttttaccgcgacctccggaggccggcgtgacaggctctgtcactaaaataggagtagaggtttaccactcttaggtgactaagcagtatcacaaataaaccctccagcaagtttaaaaataattaggtccaactcagaggaagtggagtttctcctgttgcacaaaaatgatgtctaacagctccagtgaaatcgatgtgcaggaaccgaatattgtatctgacgcatcctgtaatactgaagagcaactgaagacagttgatgatgtccttattcattgccaggttatatatgatgctctgcaaaacctggataagaagattgatgtgattcgtagaaaggtttcaaaaatccaacgtttccatgcgagatccctgtggacaaatcataagcgatatggatataaaaagcattcttaccggcttgttaaaaagcttaaactccagaaaatgaagaaaaatgaggtttacgagacattctcctaccctgaaagttacagccccactttaccagtgtcaaggcgtgagaataattccccgagcaaccttccaaggccatccttttgcatggaagaataccagcgagctgagctggaggaggacccgatcctcagccgcactccgagtccagtgcatccctcagatttctctgagcataattgtcagccgtattatgcatctgatggtgcaacgtatggttcttcttcagggctctgccttggcaaccctcgggctgacagcatccacaacacttactcaactgaccatgcttctgcagcaccaccttcagttacaaggtcaccagttgaaaatgacggttacatagaggaaggaagcatcactaagcacccttcaacctggtcggtggaagcagtggtcctatttctaaaacaaacagatcctcttgcattatgccctcttgtcgacctcttcagaagccatgaaattgacgggaaggctctgctcctactcacgagtgacgtgttgctgaagcacttgggggtgaagctgggaacggctgtgaagctatgctactacattgaccgacttaaacaaggaaaatgctttgaaaattgaaaaaatccttgtgcaaatttagattgggccaacttctagaggcaccaatgccttcttagtgtggaatcatttttctgccctttagtcgtttttgttttgtagaaagtatctctcaaaatatattatagctagaattgtagaactatgttatagtccagtctacttctttaaaaaccatttaaactgctagatagtattagaatagtccaatagaaaattcattctttataggtctttaaaaattacttttattatattgtttacaaatatatttcatgcaagaaacagaaaaaaaaaaaaaccctttgattctggttcatctcgatacagagaaccaaaacagctaagagaggtattatcagggttgacaactcctatgattgaatctatgggaattattcctcagaagagaatttaaaggtgtacccatatatatctctttctggagtattttatctgtctgatgttgcagtattctacaagtttccagaaagagaatagccatataaattattttcctttctgctattatttctctatatgttttatttattcagatttagagtaaaaaataagcatataaacttttattatgtgctcttaacagttttaagataaactataggatagatagaatggttattttatgcaagaaatattgtaccgcaagggtggtttggatgaagtctgactactttttttcaaacaaactattatattaaaactgtcatattttggctaagtttggacctataactacactttcattgtttgcatctctctatgaagatacgtctgtccaaacttttaaaaggcataactgtattttatgtgtttattctttatatagatagtattttatattttattctcacccgaagtattcacacaatctttttaaaaaaaatttgaaatggcattttgtattgccacagaggtaggatgagccatatattagtgaaatgttttattttgtaaaatataaatggattatttgccatcattagtacctctcaacttactttttagaggacaagaaacaatctgtagattggtttccatacagggaagttctccgtcctatgcaatgtttctaattaatttgcttaattctgagccattaatcctgctacactttgaatgatacattaattcagactaatctttgggggctttattttgtaagttagaactttcaagggaaacatgttcaacactattattttgttataaatttataactttgttattacattgtgtaacaaatataaggtttacgagctatgagaattggtgctatcaccattagctatttgctgtaatgtcaagaaaatgttcaccagatgcaagaatgtaccttttctttttagaaagccaaatgtactttagacatgaatgcaactatttaaagaatagcttcatcaatgttattccttacatgtcataagattcttacttaaacttggtcttctttcaaattgtttgtatgaagatgctgtacccacttgaacagtcctcaggtgtttacataaatactatgttttacagttttcatattttaaaatattaataaagttaaatcacaatagttcaaaaaaaaaaaaaaaa

SEQ ID NO: 895 - DNA, 4212 bp, Homo sapiens
ggcagtggcggttgcggggcatgcgcggctccgcgcgcggcttctcaaacatggcggcggcggtgtgaagctcggtgccggctcgcgcgatcggtgggacagaatttcgttgttttcaccgacgagactggaggaaacaacaccaaatagggataccatgggacaaacagtgaatgaagattccatggatgtcaagaaggagaatcaagagaaaactcctcagtcaagtacatcttctgtacaaagggatgatttccactgggaggagtatttgaaagagactgggtctataagtgctccttcagagtgcttccgtcagtctcagattccacctgtgaatgatttcaaagttggtatgaaattggaagcccgtgaccctcgcaatgccacttcagtatgtattgctacggttattggaattactggggccaggttacggttacgactggatggtagtgacaacagaaatgatttttggaggcttgtcgattccccagacatacaacctgttgggacatgtgaaaaggaaggagacttacttcaacctccactagggtaccagatgaatacatcctcctggccgatgttcctcttaaagacactaaatgggtctgaaatggcatctgccacattatttaagaaggaaccaccaaagcccccactaaataattttaaagtggggatgaaactggaagctattgacaaaaagaacccgtatctcatctgtcctgcgaccattggagatgttaaaggggatgaagttcatatcacatttgatggctggagtggagcttttgattactggtgcaagtatgattctcgagatattttcccagctgggtggtgtcgcctgacaggagatgtattacaacccccaggaactagtgttcctattgtaaagaatatagcaaaaacagagtcttctccttccgaagcaagccagcattcaatgcagtctccacagaaaactactctaatattaccaacacagcaggtcaggagatcaagtcgaattaaaccacctggacctactgcagtccccaaaaggagcagttctgttaaaaatatcacaccaaggaaaaaaggtccaaactcaggaaaaaaggaaaaacctttgcccgtgatatgttctacatctgcagcttctctaaaatcgctgaccagagaccgtggcatgttatataaagatgtcgcttctgggccatgtaaaatagtgatgtctacagtctgtgtctatgtaaacaaacatggaaactttggccctcatctggatcccaagagaatccagcagctgcctgaccacttcggcccgggcccggtgaatgtggtgcttcgccggattgtgcaggcctgtgtggattgtgcccttgaaactaaaactgtttttggatacctgaagccagataatcgtggaggagaagtgataactgcctcctttgatggggaaactcattccatccagctccctccagtgaacagtgcatcatttgctcttcgctttcttgagaacttctgccacagtctgcagtgtgataaccttttgagtagccagccttttagttcttccaggggtcatactcacagctctgcagagcatgataaaaatcagtcagcaaaagaagatgtaacagaaaggcaaagcaccaaacgatctcctcagcaaactgtaccatatgttgttcctctctctcctaagctccccaaaacaaaggagtatgcgtctgaaggagaaccattgtttgctgggggaagtgccattcccaaagaggagaatctttcagaagattctaagagctcatcactaaattcaggaaattatttgaatcctgcctgtagaaatcctatgtatattcatacttcagtctcccaggatttttctcgaagtgtgccaggcaccacaagttcaccactagttggggacatatcccccaagagcagtccccatgaagttaaattccaaatgcagaggaaaagtgaagctccaagttatatagctgtacctgatcccagtgtcctgaaacaaggcttctctaaggacccttcaacctggtctgtggatgaagtgatacagtttatgaaacatacagatcctcagatatcaggccccctcgccgacctcttcaggcaacatgaaattgatgggaaggctctgttcctactcaagagtgatgtgatgatgaagtatatggggctgaagctggggccagcattaaagctgtgttactacattgaaaagcttaaagaaggaaaatacagttaaaaaaatgtgtaagtttagattggacataattctcaggtgtactgttaacattttaatttaaaagtatttctcttagcagtttttgttttgtagacagttcccataaaaatattttatcagaattgcagaactgtagtaacagttcagtcaactttgtttttttcctggagtcaccaaccagctttgggagacacagccgccactcccccagtctacttctttaaaaagcatttaacaggttagtattggcatattcaaattggcagttctttatgtctttttaaattttcattgtacagtttacaaatatacttaatgtagttaacagagaaaaacctttgattttggttaacctttatatctagaaccaaaacagctaaatcccaaaggggaaaatatcagggattgacaacttctataattaaatccatgagaatttttcctcactagagaatttaaaggtgcacctgtagatatcatcttttctcagatattttgtgtgatactctgtggtgttctgttcatgttctatcagtatatctagaaagggaatagccatataaattattttccttttattatttctctgtatgttgtatttgatcatatttaaaggaaaaaagcaagcttataagctttcatgaagtgttcttaccagtttttgataaattttttaaattataggatagaattgtcattttatgcaggagatatttatactacgagggttgtttggatggagtcagattaaattttttcagtgaaattcctattattttaaaactttccatattttcactacgcttggacatttaactaggcattcttttcttacatctctatatgaagatacctgtgtccaaaatttttgaagatatatattgtatgtgtttattcttcatatggtactttaccatatttatatattgttttatacctgtaggtttacacacaagtaaatcttttttttcttgaatttaatctggcactttgcactgccacagaggtgacgatgaactatgtatatagttagatgttttgatttcgtaaaaaatatatgtccatcgtttgctatcaccagtacctctcagcttactcttcaggggatatgaaacaatctgtagattggtttccatacagggaagttctctgtcctatgcaatgtttctaattaatttgcttagttctgagccatttattctgctacactttgaaagatatattagttctgacttattgtttggggctttattttatttttatttttttgagatggagtttcactcttgttgcccaggctggagtgcaatagctcgatctcggctcactgcaacctcgcctccctggttcaagcaattctcctgcctcagcgattacaggaatgcaccaccacgcccagctaattttgtagagatggggtttctccatgttggtcaggctggtctcaaactcctgacctcaggtgatccgcccacctcggccttgcaaaatgctgggattacaggcatgagccaccatgcccagccatgtttggggctttattttataagttagaactttgaagaggaaatggtgctatatgtttattgttattactttgtgtaactttgatgtaatgtttataagctatgagaatcagttataaaagtattagccatttgttgtaaatgccaataaaatattcaccaggggcaagaatgtacattttctttttagaaaaccaaatgtactttagacatgaatgcaactatttaaagaatagcttcatttatgttattccttacatgtcataagattcttacttaaacttggtcttctttcaagttgtttgtatgaagatgctgtacccacttgaacagtcctcaggtgtttacataaatactatgttttacagttttcatattttaaaatattaataaagttaatcgcaacgattcaaaaaaaaaaaaaaa

SEQ ID NO: 896 - DNA, 4540 bp, Homo sapiens
gaatgcattagtctaatgagatgtttgcagctggagcgcagggctgctggagactaactgtgagctactaacacgggtggaagatagcttttgcaatactcggtttgcatgtgctgaaagtcatctgtcttctgagtcaacactcccgacctggtaaacaacctgctcagggctctggtgaacaagctgtagcacctcttctgcctgtgagcgatttgtcacctcattctgtaagactggcaccagcagaaatgcagtctcaaaggatcccggggagaaagcgaggccgaccctcacttcactccacgcctatgaagatggcagttcataacctttattctgcttcagctggctctttaccagcagtgaagatcccaaagaaaagagggcggaaacccgggtacaagatcaagtctcgggttctcatgactcccttagccctctcacctccgcggagtaccccagagcccgacctcagctccatccctcaggacgcagccacggtccccagcttggcggccccacaggctctcacagtctgcctctacatcaacaagcaggccaatgcggggccctatctggagaggaagaaggtgcagcagctcccggagcattttgggcccgagcggccatcggcggtgctgcagcaggccgtccaagcctgcatcgactgcgcccaccagcagaagctggtcttctccctggtcaagcagggctatggtggtgagatggtgtcagtctcggcttcctttgatggcaaacagcacctgcggagcctgcctgtggtgaacagcatcggctatgtcctccgcttcctcgccaagctgtgccgaagcctcctgtgcgatgacctcttcagccaccagcccttccccaggggctgcagtgcctctgagaaagtccaggagaaagaggaagggaggatggaatcagtcaagacagtcaccaccgaagagtacctggtgaaccctgtgggcatgaaccgctacagcgtggacacctccgcctccacctttaaccacaggggctccttgcacccctcctcctcgctgtactgcaagaggcagaactctggagacagccaccttgggggtggtcctgctgccaccgctggtggtccccgcactagccccatgtcttctggtggcccctcggcacctgggctgaggcctccagcctccagccccaagagaaacacgacctctcttgaaggaaacagatgtgcctcaagcccttctcaggatgcgcaggatgccaggcggccacggagcaggaacccctccgcctggactgtggaggacgtggtgtggtttgtgaaggacgccgacccacaggctctggggcctcacgtggagctcttcagaaagcacgagattgatggcaacgctctgctgttgctgaagagtgacatggtcatgaagtacctgggcctgaagctgggacctgcactgaaactctgctaccacattgacaaactgaagcaagccaagttctgacttttttaaaaagacagaagcgaaacccaaaacaacagatcccaagattatcttctgccttaccaatatcccgccaacatcacaaactagactctcctcttaaaattaacagccacagagacgtggtctttttataaaacttgtgaatctttgccttttgaagaatttaacatggaccttttcgagaggctcctctgtgttcataatttgccaaaaaattacaaaagcctgtgatttttaacatccctgttatgctggtttctcttaaagtgggtcctatttgcataacgagagagtggggaactgaatgcttatgcccaaggagagttctggagggttcaaaggatgaaagaaggacctttgtccctgcggtctctgcagggacaaccccctcagcaccatctgcctctaactctgacctggggacctatccatgtgagccttgtttgcctcagctctggaagctgacttctgaagatgactgcctcaccttgcactgtctggaaaacttgaattattttacgccgtgaaagaaaaaggaaaaaaaaaaaaatcttttctgttcctagaaaatctgaagtactgtgtttctccgctagagggcagactgctaatgaaatttcaggaccctcactgactgcagtagcaggattgttcagtactgagtggatgggttagggtgtctgtgaacaagatctagcccacacagaaacaggggatttattccacagttagcaccacagattgcgacttgggaagaaaccatcagctagaggggtctagttcgtatccaatcattattgactgactgactgatactcaactagcaaaggcaagaatttggaagcacgctctacccagatgggactttggagttccttcccttccagagtccttattgaggtgttgaagtgttggcatgccgaagaatcttagtgacatttagccatgggtgtttctttaaaaaaggaaaagaaaatgtctcaacgaagctttgaaatgggagagtgttgatttctagttacattgctgggttatgtagttgtatctgtggctaatttttctagtcctcaacaaatacacagacatgctattatggggtttaattcaatttacaaataggttttccttcctcacagtggagtaatagaaaaaattgattttctgctcctttgcagctgtgtccagagacggacaatgaatccacaatttattaggcagaggcacaacttctccaccattcgttttatccttctcttttctctgtttccctccacctctcttcttcttctttcacactgagcagaaaacatatcttcaaaatgaattcgcctttgccatgtgcatattctcttccttaaaaggacatcaacagtgttggagatgaggagatgaacattagattttggaatttctgggagggagagggttagggatgactcagggcctcccttcgcccaaaggtgaatcagaaaaggcacccctttctctgggatacaacctgagcaggggtctcagctggcaagtggagcagggtgggggctcaacctcctcaccgcttgatcagctgccgttgtacagagcatgacctgtataaccttgagggcagccctgggtagatctgcagagtgaccctctatatagttagaatccagatgaaggccataagaaatagtccatgccatgccgttaggcccactttcatgtgcagtacttgagaaagcacatcgtagcctccttttcagacacacaaatggcggctggactgagagcatggcagagaaggggaggaggagaatgtactaaacttgctcactgaattgagcttgagttattagattgtagaagagcttgatgtctggtgattttgttacaggaagggggtcccgatccagaccccaagagagggctcttggatctcatgcaagaaagaattcagggtgagtccataaagtaaagtgaaagcaagtttattaagaaagtaaaggaaggaaagaatggctaccccatagtcaaagcagctctgagggctgctggttgcccatttttatgtttatttcttgatatgctaaacaaggggtggattattcatgcctcccccttttagatcatatagggtaacttcctgatgttgccatggcatttgtaaaccgtcatggcactggtggtagtatagcagcgaggacaaccagaggtcactctcgttgccatcttggttttggtgggttttagccaacttctttactgcaacctgttttatcagaaggtctttatgacctatatcttgtgctgacctcctgtctcatcctgtgactcagaatgctttagccatctgggaatgcagcccagtaggtctcagcctcattttacccagctcccattcaagatggagttgctctggttcaaatgcctctgacaggttcagcacctgagaaaagtaccttgaatcaggccttggggcagagtcttcaagattttaaggtgatagggcctgtctcttaagaatttattaatcgtaagtgctcactgctggtttagagttagatacatttccctcaaaacagccatgggcaggttatgtactcagaactgccagggtgaaaacaatgagatccagaaaaatcccacaacaatccaggtttttcactcctcttttttttctcaatcttccgatacttgtggtacctcttccatcaacagatacctcatgtagtgacttccagtatcaagttttcaaaacttcctacccaccctcatcagtgcctccttcactacagagtcacaaacattggtgctctcaaataaaaatcagccccaaacaatgtcaaagagatcccttgagtagttttcaggcgagagatatgttctcatttcaagtcttggagaaaactggatccatgttcacgtggaacttctctcgcggaggtgctatctcattttgcattaaactttaagcaggacagattgctgaagccatgatatttaaggtttgactttttaaaaatctcattactcttaaaataaatgctgccacatcagaaaaa

SEQ ID NO: 897 - DNA, 4446 bp, Homo sapiens
ggcactaaaggtttgcttccgggcgtttcttttgcttccccttccctctttcacgcttcctcccctccccctcctcccttatcccttcgctttcgctcttttccgtcgaggccgacccctgagttgtgagtctggggtctggttggtgaaaaagagcccttgaagctggaagacgggagaggacaaaagcatgtcttcccttcctgggtgcattggtttggatgcagcaacagctacagtggagtctgaagagattgcagagctgcaacaggcagtggttgaggaactgggtatctctatggaggaacttcggcatttcatcgatgaggaactggagaagatggattgtgtacagcaacgcaagaagcagctagcagagttagagacatgggtaatacagaaagaatctgaggtggctcacgttgaccaactctttgatgatgcatccagggcagtgactaattgtgagtctttggtgaaggacttctactccaagctgggactacaataccgggacagtagctctgaggacgaatcttcccggcctacagaaataattgagattcctgatgaagatgatgatgtcctcagtattgattcaggtgatgctgggagcagaactccaaaagaccagaagctccgtgaagctatggctgccttaagaaagtcagctcaagatgttcagaagttcatggatgctgtcaacaagaagagcagttcccaggatctgcataaaggaaccttgagtcagatgtctggagaactaagcaaagatggtgacctgatagtcagcatgcgaattctgggcaagaagagaactaagacttggcacaaaggcacccttattgccatccagacagttgggccagggaagaaatacaaggtgaaatttgacaacaaaggaaagagtctactgtcggggaaccatattgcctatgattaccaccctcctgctgacaagctgtatgtgggcagtcgggtggtcgccaaatacaaagatgggaatcaggtctggctctatgctggcattgtagctgagacaccaaacgtcaaaaacaagctcaggtttctcattttctttgatgatggctatgcttcctatgtcacacagtcggaactgtatcccatttgccggccactgaaaaagacttgggaggacatagaagacatctcctgccgtgacttcatagaggagtatgtcactgcctaccccaaccgccccatggtactgctcaagagtggccagcttatcaagactgagtgggaaggcacgtggtggaagtcccgagttgaggaggtggatggcagcctagtcaggatcctcttcctggatgacaaaagatgtgagtggatctatcgaggctctacacggctggagcccatgttcagcatgaaaacatcctcagcctctgcactggagaagaagcaaggacagctcaggacacgtccaaatatgggtgctgtgaggagcaaaggccctgttgtccagtacacacaggatctgaccggtactggaacccagttcaagccagtggaacccccacagcctacagctccacctgccccacctttcccacctgctccacctctatccccccaagcaggtgacagtgacttggaaagccagcttgcccagtcacggaagcaggtagccaaaaagagcacgtcctttcgaccaggatctgtgggctctggtcattcctcccctacatctcctgcactcagtgaaaatgtctctggtgggaaacctgggatcaaccagacatatagatcacctttaggctccacagcctctgccccagcaccctcagcactcccggcccctccagcacccccagtcttccatggcatgctggagcgggccccagcagagccctcctaccgtgctcccatggagaagcttttctacttacctcatgtctgcagctatacctgtctgtctcgagtcagacctatgaggaatgagcagtaccggggcaagaaccctctgctggtcccgttactatatgacttccggcggatgacagcccggcgtcgagttaaccgcaagatgggctttcatgttatctataagacaccttgtggtctctgccttcggacaatgcaggagatagaacgctaccttttcgagactggctgtgacttcctcttcctggagatgttctgtttggatccatatgttcttgtggaccgaaagtttcagccctataagcctttttactatattttggacatcacttatgggaaggaagatgttcccctatcctgtgtcaatgagattgacacaacccctccaccccaggtggcctacagcaaggaacgtatcccgggcaagggtgttttcattaacacaggccctgaatttctggttggctgtgactgcaaggatgggtgtcgggacaagtccaagtgtgcctgccatcaactaactatccaggctacagcctgtaccccaggaggccaaatcaaccctaactctggctaccagtacaagagactagaagagtgtctacccacaggggtatatgagtgtaacaaacgctgcaaatgtgacccaaacatgtgcacaaaccggttggtgcaacatggactacaagttcggctacagctattcaagacacagaacaagggctggggtatccgctgcttggatgacattgccaaaggctcttttgtttgtatttatgcaggcaaaatcctgacagatgactttgcagacaaggagggtctggaaatgggtgatgagtactttgcaaatctggaccatatcgagagcgtggagaacttcaaagaaggatatgagagtgatgccccctgttcctctgacagcagtggtgtagacttgaaggaccaggaagatggcaacagcggtacagaggaccctgaagagtccaatgatgatagctcagatgataacttctgtaaggatgaggacttcagcaccagttcagtgtggcggagctatgctacccggaggcagacccggggccagaaagagaacggactctctgagacaacttccaaggactcccaccccccagatcttggacccccacatattcctgttcctccctcaatccctgtaggtggctgcaatccaccttcctccgaagagacacccaagaacaaggtggcctcatggttgagctgcaatagtgtcagtgaaggtggttttgctgactctgatagccattcatccttcaagactaatgaaggtggggagggccgggctgggggaagccgaatggaggctgagaaggcctccacctcaggactaggcatcaaggatgagggagacatcaaacaggccaagaaagaggacactgacgaccgaaacaagatgtcagtagttactgaaagctctcgaaattacggttacaatccttctcctgtgaagcctgaaggacttcgccgcccacctagtaagactagtatgcatcaaagccgaagactcatggcttctgctcagtccaaccctgatgatgtcctgacactgtccagcagcacagaaagtgagggggaaagtgggaccagccgaaagcccactgctggtcagacttcggctacagcggttgacagtgatgatatccagaccatatcctctggctctgaaggggatgactttgaggacaagaagaacatgactggtccaatgaagcgtcaagtggcagtaaaatcaacccgaggctttgctcttaaatcaacccatgggattgcaattaaatcaaccaacatggcctctgtggacaagggggagagcgcacctgttcgtaagaacacacgccaattctatgatggcgaggagtcttgctacatcattgatgccaagcttgaaggcaacctgggccgctacctcaaccacagttgcagccccaacctgtttgtccagaatgtcttcgtggatacccatgatcttcgcttcccctgggtggccttctttgccagcaaaatccgggctgggacagaacttacttgggactacaactacgaggtgggcagtgtggaaggcaaggagctactctgttgctgtggggccattgaatgcagaggacgtcttctttagaggacagccttcttcccaacccttcttgaactgtcgtttcctcaggaactgggtcttcctgattgttgaaccctgacccgaagtctctgggctagctactccccccagctcctagttgatagaaatgggggttctggaccagatgatcccttccaatgtggtgctagcaggcaggatcccttctccacctccaaaggccctaaagggtggggagagatcaccactctaacctcggcctgacatccctcccatcccatatttgtccaagtgttcctgcttctaacagactttgttcttagaatggagcctgtgtatctactatctccagtttgtattatttcttgaaagtcttttaacaatatgataaaactaagattgtgaaa

SEQ ID NO: 898 - DNA, 3527 bp, Homo sapiens
agtaacaaatgaagtgcgcgctgcgacacctcccagcccaccgaactccgccgccatttcctcgcttggcctaacggttcggccaatcccagcgcgcatcaagaaggactgaggctccgccaatcggaggccgccgatttcgacccttcgcctcggcccggcccaatccaggccccggccccgccgcccccggcccgcccccgcggtgccctctctcctccctctttgtgcgtctcgcgccgccgccgcccgccgcgtgagaggacgggctccgcgcgctccggcagcgcattcgggtcccctccccccgggaggcttgcgaaggagaagccgccgcagaggaaaagcaggtgccggtgcctgtccccgggggcgccatggcgaccggagcgaacgccacgccgttggacttcccaagtaagaagcggaagaggagccgctggaaccaagacacaatggaacagaagacagtgattccaggaatgcctacagttattccccctggacttactcgagaacaagaaagagcttatatagtgcaactgcagatagaagacctgactcgtaaactgcgcacaggagacctgggcatcccccctaaccctgaggacaggtccccttcccctgagcccatctacaatagcgaggggaagcggcttaacacccgagagttccgcacccgcaaaaagctggaagaggagcggcacaacctcatcacagagatggttgcactcaatccggatttcaagccacctgcagattacaaacctccagcaacacgtgtgagtgataaagtcatgattccacaagatgagtacccagaaatcaactttgtggggctgctcatcgggcccagagggaacaccctgaagaacatagagaaggagtgcaatgccaagattatgatccgggggaaagggtctgtgaaagaagggaaggttgggcgcaaagatggccagatgttgccaggagaagatgagccacttcatgccctggttactgccaatacaatggagaacgtcaaaaaggcagtggaacagataagaaacatcctgaagcagggtatcgagactccagaggaccagaatgatctacggaagatgcagcttcgggagttggctcgcttaaatgggacccttcgggaagacgataacaggatcttaagaccctggcagagctcagagacccgcagcattaccaacaccacagtgtgtaccaagtgtggaggggctggccacattgcttcagactgtaaattccaaaggcctggtgatcctcagtcagctcaggataaagcacggatggataaagaatatttgtccctcatggctgaactgggtgaagcacctgtcccagcatctgtgggctccacctctgggcctgccaccacacccctggccagcgcacctcgtcctgctgctcccgccaacaacccacctccaccgtctctcatgtctaccacccagagccgcccaccctggatgaattctggcccttcagagagtcggccctaccacggcatgcatggaggtggtcctggtgggcccggaggtggcccccacagcttcccacacccattacccagcctgacaggtgggcatggtggacatcccatgcagcacaaccccaatggacccccacccccttggatgcagccaccaccaccaccgatgaaccagggcccccaccctcctgggcaccatggccctcctccaatggatcagtacctgggaagtacgcctgtgggctctggggtctatcgcctgcatcaaggaaaaggtatgatgccgccaccacctatgggcatgatgccgccgccgccgccgcctcccagtgggcagcccccaccccctccctctggtcctcttcccccatggcaacaacagcagcagcagcctccgccaccccctccgcccagcagcagtatggcttccagtacccccttgccatggcagcaaaatacgacgactaccaccacgagcgctggcacagggtccatcccgccatggcaacagcagcaggcggctgccgcagcttctccaggagcccctcagatgcaaggcaaccccactatggtgcccctgccccccggggtccagccgcctctgccgcctggggcccctccccctccgccgcctccaccgcctggttccgccggcatgatgtatgccccgccccctcctcctccgcctcccatggacccttctaactttgtcaccatgatgggcatgggggtggcgggcatgccgcccttcgggatgcctccagctcccccaccgcctccaccacagaactagacttgttttttaagaaaatatatattatatatagagagaattggtctcgtttaaacacgccgaacctcaccatatggagccagacattgggacgcacgcatgtgattgtgtgtgcacgcatgtgtgtgtgtgcacgcactgggctgggccaagcgactgaggattcgcttgggaacgggcaggtggtagtaggggcgccagcttgggctctcctggcgccccgtagcatcgagtgtcttctttgtcttctttctctcctcacccaactccctttgcctctccccaaaccgggccgccaggatccctccccgcggcggcgatggcccgagccatgagagtgaggactttccgcgcccattggtgacccttccaggcagacagcctcagcaacgcccctggtggacaggatggttcggcaaagcagcctgagttatttttgtggacggaatcggaacacgctggctccatatcgtgaaatttttattaatttttttctttttcctttgttacttctttatcttttcctttcttcagactccgtccaaggagatgctctccccggtcttctgctgcaatttagattcctttcccttctctccagttctccttcccttaccaaggagaggggagcaaatggttttgggcaagggctttggccattcatgtcaagctggttgtgggtttttcaaggtgccatagccacccccaaagatgtttgtttaaagcgtggggttttttaatctctgccacccttgtcaagggagtcttgtaaagttgccgagggtaggttcatctccaggtttcgggattcccatccgtcctggcgatcctgccagcagtgggtgggcagcctgagctccctcgggctcgcctgccagcctggagttcttcctgtgctccttgatcacctgagctgcctcagattccatttggtcctctccttcctggaaggcttccttttatgttttgttttaatcccaaatgtctgaatgttttgcagtgtgtaggggtttgagccccttgttcattctccttcctttttcctcccgcttccctctccatgaagtgattctgttgacaataatgtatactgcgcgttctcttcactggtttatctgcagaaatttctctgggcttttttcggtgttagattcaacactgcgctaaagcggggatgttccattgaataaaagagcagtgtggttttctgggaaaaaaaaaaaaaaaaaa

SEQ ID NO: 899 - DNA, 12227 bp, Homo sapiens
tgagctgcgaggcccgagagtcagaacctgggggagagggatggtctctgcacgggggggagccggaggagccgccgccgctgccgacgccaccgccgcagccgccgccgccgccgccccggcacccgcctcccggcgctgacggtctcgtacgaagccggcgagggggagccagcagcggcggtcgccggcacgccgcccagcatggtccgggaaaccaggcatctctgggtgggcaacttacccgagaacgtgcgggaagagaagatcatcgagcatttcaaacgatatggccgcgtggaaagtgtcaaaattcttcccaagaggggatctgaaggaggagtggctgcctttgtggattttgtggacatcaaaagtgcacagaaagctcacaactcggtcaacaaaatgggtgacagagacctacgcacggattataatgaaccaggcaccatcccgagtgctgctcggggattggatgatacagtttccatagcatctcgtagtagagaggtttctgggttcagaggaggtggtggagggcctgcttatggtcccccaccgtcacttcatgcacgagaaggacgttatgagcggagacttgatggggcttcagataacagggagcgtgcttatgaacatagtgcctatggacaccatgaacgggggacgggaggatttgatcggacaagacattacgatcaggattactatagagatcctcgagagcggactttacaacatgggctctattacgcttctcggagtcgaagtccaaatcgctttgatgctcatgacccccgatatgaacctagggctcgcgagcagtttacactgcccagtgtggtacacagggatatctacagggatgatattacccgggaggtacgaggcagaaggccagagcggaattaccagcacagcaggagtcggtcaccacattcatcccagtctagaaatcagtctcctcagagactggctagccaagcatctagacccacaaggtcccctagcggcagcggctctagaagtagatcctccagtagtgattcaatcagcagcagcagtagtaccagcagtgacagcagtgattccagcagtagttcaagtgatgattctccagctcgatcagttcagtctgcagcagtccctgcacccacttcccagttgctttcatctctggaaaaagatgagccccgtaaaagttttggcatcaaggtccagaatcttccagtacgctctacagatacaagccttaaagatggccttttccatgaatttaagaaatttggaaaagtaacttcagtgcagatacatggaacttcagaagagaggtatggtctggtattctttcggcagcaagaggaccaagaaaaagccttgactgcatcaaaaggaaaacttttctttggcatgcagattgaagtaacagcatggataggtccagaaacagaaagtgaaaatgaatttcgccccttggatgaaaggatagatgaatttcaccccaaagcaacaagaactctctttattggcaaccttgaaaaaaccactacttaccatgaccttcgcaacatcttccagcgctttggagaaattgtggatattgacattaagaaagtaaatggagttcctcagtatgcgtttctgcaatactgtgatattgctagcgtttgtaaagctattaagaagatggatggggaatatcttggaaataatcgcctcaagctgggttttggaaagagcatgcctacaaactgcgtgtggctagatgggctttcttcgaatgtgtcagatcagtatttaacacgacatttctgccgatatgggcctgtggtaaaggtggtgtttgaccgcttaaaaggcatggccctggttctctacaatgaaattgaatatgcacaagcagctgtaaaagagaccaaagggaggaaaatcggtgggaataaaattaaggtggattttgcaaatcgggaaagtcagctggctttttatcactgcatggagaaatctggtcaagacatcagagacttttatgaaatgttagccgaaagaagagaggaacgaagggcatcctacgactataaccaagatcgtacatattatgagagtgttcgaactccaggcacttatcctgaggattccaggcgggactatccagctcgagggagagagttttattcagaatgggaaacttaccaaggagactactatgaatcacgatactacgatgatcctcgggaatacagggattacaggaatgatccttatgaacaagatattagggaatatagttacaggcaaagggaacgagaaagagaacgtgaaagatttgagtctgaccgggacagagaccatgagaggaggccgattgaacgaagtcaaagtcctgttcacttgcgacgtccacagagtcctggagcgtctccctctcaggcagagaggttgccgagtgattctgagaggaggctttacagccgatcctcagaccggagtggaagctgtagctcactctcccctccaagatatgagaaactggacaagtctcgtttggagcgctatacaaaaaatgaaaagacagataaagaacgaacttttgatccggagagagtggagagagagagacgcttaatacggaaggaaaaagtggaaaaggacaaaactgacaagcagaaacgcaaaggaaaggttcactcccctagttctcagtcttcagaaacggaccaagaaaatgagcgagagcaaagccctgaaaagcccaggagttgtaataaactgagcagagagaaagctgacaaagagggaatagcgaaaaaccgcctggaactcatgccttgcgtggttttgactcgagtgaaagagaaagagggaaaggtcattgaccacactcctgtggaaaagttgaaagccaagcttgataatgacactgtcaaatcttctgccctggaccagaaacttcaggtctctcagacggagcctgcaaaatctgacttgtctaaactggaatcagttagaatgaaagtaccaaaggaaaaggggctttcaagccatgttgaagtggtggagaaggaaggcaggcttaaagccaggaagcacctcaagcctgagcagcctgcagatggggtaagtgctgtggatctggagaagctggaagccaggaaaaggcgctttgcagattccaatttaaaagcagaaaagcaaaaaccagaggtcaagaaaagcagtccagagatggaggatgctcgcgtgctttcaaaaaagcagcctgacgtgtcctctagagaggtcattctgctgagggaaggagaggctgaaagaaagcctgtgaggaaagaaattcttaaaagagaatctaaaaaaatcaaactggacagacttaatactgttgccagccccaaagactgtcaggagcttgccagtatttctgttgggtctggctcaaggcccagctcagacctacaagcaagactgggagaactagcaggtgaatctgtggaaaatcaagaagtccaatcaaaaaagcccattccctcaaaaccacagctcaaacagctgcaggtattagatgatcaaggaccagagagagaagacgttaggaaaaactattgcagtcttcgtgatgaaacacctgaacgtaaatcaggccaagagaaatcacattcagtaaatactgaagaaaaaattggcattgacatcgatcacacgcagagttaccgaaaacaaatggaacagagtcgtaggaaacagcagatggaaatggaaatagccaagtctgagaagtttggcagtcctaaaaaagatgtagatgaatatgaaagacgtagcctcgttcacgaggtaggcaaaccccctcaagatgtcactgatgactctcctcctagcaaaaagaaaaggatggatcatgtcgattttgatatctgcaccaagcgagaacggaattacagaagttcacgccaaatcagcgaagattctgaaaggactggtggttctcccagtgtccgacatggttccttccatgaagatgaggatcccataggctcccctaggctactgtcagtaaaagggtctcctaaagtagatgaaaaagtcctcccctattctaacataacagtcagggaagagtctttaaaatttaatccttatgattctagcaggagagaacagatggcagatatggccaaaataaaactatctgtcttgaattctgaagatgaactaaatcgttgggactctcagatgaaacaggatgctggcagatttgatgtgagtttcccaaacagcataattaagagagatagccttcgaaaaaggtctgtacgagatctggaacctggtgaggtgccttctgattctgacgaagatggtgaacacaaatcccactcacccagagcctctgcattatatgaaagttctcgattgtcttttttattgagggacagagaagacaagctacgtgagcgagatgaaagactctctagttctttagaaaggaacaaattttactcttttgcattggataagacaatcacaccagacactaaagctttgcttgaaagagctaaatccctctcttcatctcgtgaagaaaattggtcttttcttgattgggactcccgatttgcaaattttcgaaacaacaaagataaagaaaaggttgactctgctccaagacctattccatcctggtacatgaaaaagaagaaaattaggactgattcagaagggaaaatggatgataagaaagaggaccataaagaagaagagcaagagaggcaggaattgtttgcttctcgttttttacacagctcaatctttgaacaagattccaagcgattgcagcatctagagagaaaagaggaagattctgacttcatttctggtaggatctatgggaagcagacatctgagggagcaaacagcacaactgattccattcaagaaccagtagttctgttccatagcagatttatggagctcacacggatgcaacagaaagaaaaagaaaaagaccagaaacccaaagaggttgagaaacaggaagatacagagaatcatcccaagaccccagaatctgctcctgagaataaagattcagaactgaaaactccaccttccgttgggcctccaagtgtcacagtcgtaactctagaatcagccccatcagcactagagaagaccactggtgacaaaacggtagaggcgcctttggtaacagaagagaagactgtggagccagctaccgtctcagaagaagcaaagcctgcatctgaacctgctcctgcccctgtggaacagctggaacaagtagacctgcccccaggagcagaccccgataaagaagctgccatgatgcctgcgggtgttgaggaaggttcatcaggtgaccagccgccttatctggatgccaagcctccaactcccggggcctcgttttcccaggcagagagcaacgtagatccagagcctgacagtacccagccactttcaaaaccagctcagaagtctgaggaagccaatgagccaaaggccgaaaagccagacgccactgcagatgctgagcctgatgcaaaccagaaagccgaagctgctcctgagtctcagcccccagcttctgaagatttagaggttgatcctccagttgctgcaaaggataaaaagccaaacaaaagcaagcgttcaaagacccctgttcaggcagctgcagtgagtatcgtggagaagcccgtcacaaggaagagtgagaggatagaccgggaaaaactcaagcggtccaattctcctcggggagaagcacagaagcttttggaattgaagatggaggcagagaagattacaaggactgcttctaaaaactctgctgcagaccttgaacatcccgaaccaagtttgcctctcagccgaacaaggcgccggaatgtaaggagcgtctatgcaaccatgggtgaccatgaaaaccgctctcctgtcaaagagcccgttgagcaaccaagagtgaccagaaagagattggagcgagagcttcaggaggctgcagcggttcccaccacccctcggaggggaaggcctccaaagacacgccggcgagccgatgaagaggaggagaacgaggccaaggaacctgcagaaacactcaagccacctgagggatggcggtcgccaaggtcccagaaaactgcagctggtggtggaccccaagggaaaaagggaaaaaatgaaccgaaggtggatgctacacgtcctgaggccaccactgaggtgggcccccaaataggcgtgaaagagagctccatggaacccaaggctgctgaggaggaggcagggagtgaacagaaacgtgacagaaaagatgctggcacagacaaaaacccccctgaaaccgcccctgttgaagttgtagagaaaaaaccggcccctgaaaaaaactccaaatcaaagagaggaagatctcgaaactccaggttagcagtggacaaatctgcaagtctgaaaaatgtggatgctgctgtcagtcccaggggggctgcagcacaggcaggggagagggaatctggggtggtggcagtctcccctgagaaaagtgagagtccccaaaaggaggatggtttatcatcccagttgaaaagtgatccagttgatccagacaaggaaccagagaaagaagacgtgtctgcctctgggccgtccccagaagccacccagttagccaagcagatggagctggagcaggccgtggaacacatcgcaaagctcgctgaggcctctgcctctgctgcctataaggcagatgcaccagagggccttgccccagaggacagggacaagcctgcacaccaagcaagtgaaacagagctggctgcggccatcggctccatcatcaatgacatttctggggagccagaaaacttcccagcacctccaccttatcctggagaatcccagacagatctgcaaccccccgcaggtgcacaggcgctgcagccttctgaggaaggaatggagacagatgaggctgtatctggcatcctggaaactgaggctgctacagaatcttctaggcctccagtcaatgctcctgacccctcagccggcccaacagataccaaggaagccagaggaaatagcagtgaaacctcacactcagtgccagaagccaaagggtctaaagaagtggaagtcactcttgttcggaaagacaaagggcgccagaaaacaacccgatcacgccgcaagcgaaacacaaacaagaaagtggtggctcctgtagagagccatgtccctgaatccaaccaagctcaaggtgagagtcctgctgcaaatgaggggacaacagtacagcaccccgaagccccacaggaagaaaagcagagtgagaaaccccattccactcctcctcagtcatgtacttctgacctaagcaagattccctccacagagaattcgtcccaagaaatcagtgttgaggaaaggactccaaccaaagcatctgtgcccccagaccttcccccacctccccagccagcaccggtggatgaggagcctcaagccaggttcagggtgcattccatcattgaaagtgacccggtgaccccacccagcgatccaagcatccccatacccacactgccttctgtaactgcagcaaagctctcacctcctgtcgcctctggggggatcccacaccagagcccccctactaaggtgacagagtggatcacaaggcaggaggagccacgggctcagtctactccatctccagctcttcccccagacacaaaggcctctgatgttgacaccagctccagcaccctgaggaagattctcatggaccccaagtatgtgtctgccacaagtgtcacttccacaagtgtcaccacagccattgcagagcctgtcagtgctgccccttgcctacatgaggccccgcccccgccagttgactctaaaaagcctttagaagaaaaaacagcacctccagtgacaaacaactctgagatacaagcctcggaggtgctggtagctgctgacaaggaaaaggtggctccagtcattgctcccaaaattacctctgttattagccggatgcctgtcagcattgacctggaaaattcacagaagataaccttggcaaaaccagctcctcaaaccctcactggtctggtgagcgcactcactggcctggtgaacgtctccctggtcccggtgaatgccctgaaaggccccgtgaagggctcagtgaccacactgaaaagtttggtgagcacccctgctgggcccgtgaacgtcctgaaagggcctgtgaatgttcttacggggccagtgaatgttctcaccactccagtgaacgccacggtgggcacagtgaatgccgccccaggcacagtcaatgccgctgcgagtgcagtgaatgccacagcaagtgcagtgaccgtcacagcgggtgcggttactgctgcatctggtggtgtaacggccacaacaggcacggtgacaatggcaggggcagtgattgcgccgtcaacaaagtgcaaacagagagcgagtgctaatgaaaacagtcggttccacccagggtccatgcctgtgatcgacgatcgtccggcagacgcgggctcaggggcggggctgcgtgtgaacacttctgaaggggttgtgctcctgagttactcagggcagaagaccgaaggcccacagcggatcagcgccaagatcagccagatccccccggccagtgcaatggacattgaatttcagcagtcagtgtccaagtcccaggtcaaacctgattctgtcacagcatcgcagcctccatccaaaggccctcaagctcctgcaggctatgcgaacgtggccacccattccacgttggtactgaccgcccagacatataatgcctctcctgtgatttcgtctgtgaaggccgataggccatccttggagaagcccgagcccattcacctctcggtgtccacgcctgtcacccagggaggcacagtgaaggttctcacccaggggatcaacacaccccctgtgctggttcacaaccagctggtcctcaccccaagcattgtcaccacaaacaagaagcttgctgaccccgtcacccttaaaatcgagaccaaggtccttcagccggccaacctggggtccacgctcacgccccaccaccctcctgctctgcccagcaaactgcctacagaagtcaaccatgtcccctcggggcccagcatcccagcagatcgaactgtctcccatttggcagctgcaaagctagatgctcattctcctcgaccaagtggacccgggccatcctcattcccaagggcaagccaccccagcagtactgcatctacggcgctctccaccaacgccacagtcatgctggctgcaggcatcccagtgccccagttcatctccagcatccacccagagcagtctgtcatcatgccaccccacagcatcacccagactgtgtccctgagccacctctcccagggcgaggtgagaatgaacactcccacgctgcccagtatcacctacagcatccggccagaagcgcttcactctcctcgggctccgctgcagccccagcaaatagaggtcagggccccacagcgtgccagcaccccgcagccagccccagctggtgtgcctgcactggcctcccagcaccctcccgaggaggaagtgcattatcaccttcctgtcgctcgagccacagcccctgtgcagtcagaggtactagtcatgcagtctgagtaccgactgcacccctatactgtgccacgggatgtgaggatcatggtgcatccacatgtgacggcagtcagcgagcagcccagggccgcggatggggtggtgaaggtgccaccagccagcaaggcccctcagcagccagggaaggaagctgccaagacaccagatgccaaagctgcccccacccccacccctgcccccgtccctgtccctgtcccccttcctgcccctgctcctgcccctcatggtgaggcccgtatcctcacagttacccccagtaaccaactccaggggctgcctctgacccctcctgtggtggtgacccatggggtgcagattgtgcactccagcggggagctgtttcaagagtaccggtacggcgacatccgcacctaccaccccccggcccagctcacacacactcagtttcccgccgcttcctctgttggcctgccttcccggaccaagacagctgctcagggccctcctcctgaaggtgagcccctgcagcctcctcagcctgtgcagtccacacagcctgcccagcctgcaccaccctgcccgccctcccagctcggtcagcccggccagccaccaagcagcaagatgcctcaagtgtcccaggaggcaaaggggacccagacgggagtagagcagcctcgcctcccagctggacctgcaaacaggccacctgagcctcacacccaggttcagagggcacaagcagaaacaggcccgacttccttcccctcccctgtgtctgtctccatgaagcctgaccttccagtctctcttcccactcagactgccccaaaacagccgttgtttgtcccaacaacctctggccccagcaccccaccaggactggttctgccacacactgaattccagccagcccccaaacaagattcctctccacacctgacttcccagagacccgtggatatggttcaacttctgaagaagtaccccatcgtgtggcagggcctgctggccctcaagaatgacacagctgctgtgcagctccacttcgtctctggcaacaacgtcctggcccatcggtccctgcccctttctgaaggagggcccccactaaggatcgcccagaggatgcggctggaggcaacgcagctggaaggggttgcccgaaggatgacggtggagacagattactgtctgctgctggctctgccctgtggccgtgaccaagaggatgttgtgagccagaccgagtccctcaaggctgccttcatcacttacctgcaggccaagcaggcggcagggatcatcaacgttcccaaccctggctccaatcagcctgcctacgtgctgcagatcttcccgccctgtgagttctctgagagtcacctgtcccgcctggcccctgacctccttgccagcatctccaacatctctccccacctcatgattgtcattgcctccgtgtgagccactgagtggttatcacctcagtgaatcttcccagggctctgcagtaaaaacaaaggacaacccagccaagcagaggaagaagctgccgaaggggacagactccactgccagacggccagccgtttgctgtcctgccgcccggctcagtcggccagacttcctctaggagtggtgctgctaccttgtatgtttacataatgctttagcccaaggacacatcaccaacccatggactcgcagacaccggggctgggtttctctttcctctttttggagaaaaggaacagggcagtggaatgaaaattttttgtttgtttgtttttaagaaacaagaaaacagaactgcctttgcactaaattagtgacttggacttttgcccagtgaagacaggctgtgacactctggatgtcttggtgtgtgtagacacacattgcagactcttaacgcaggaaggacttcaaacttctgctgagaccttggggtcaaggaacatttcattggttttttttgtccacccccatctcccttgctcatttggatgcgtcaccttaattctcctgctgccaccgtctttgattcaccgggatgtacagtttacagttgaagagcaaacagaaaggttttctcttggtgggatatgcagaacttgggatgtgtgtatatataaatatataatatatataaatatatataatactgacttaaaaaatcaaatcccccgacatacgttttttttaatctgtgccaaaaatgtgttttcagaggaaatcttattttcatattcagactttgtattgcccactcatttgtataagtgcgcttcggtacagcacgggtcctgctcccgcgatgtggaagtgtcacacggcacctgtacaaaaagactggctaacccctcttcctattaccttgatctcttcccccaacttcctaacacttattaatttatgaaactgtttttctcagcgcagttttgttttgtgtgtccattggattacaaactttattaaaaaatataaaacac

SEQ ID NO: 900 - DNA, 3757 bp, Homo sapiens
cgcctgcttttgcccgggtcctgagaacaggggctccccacactttttttttttttggttttgttttatttcgtttccgcgcgtctctttctactgcaaacagaaatgggagggtggacaggcgggtaggagcggatcagacgcccaggacgcagcagcccgagtccgcacagggtttgcgggaggtggtgaccgcgctggggacgccaggacgcgaatgaacctccggggcgcgctcggggcctgcgctcagagcttggaaaactggagtttgcttttcctccggccacggagagaacgcgggtaacctgtgtggggggctcgggcgcctgcgcccccctcctgcgcgcgcgctctcccttccaaaaatgggatctttcccccttcgcaccaaggtgtacggacgccaaacagtgatgaaatgagaagaaagccaattgccggcctggggggtgggggagacacagcgtctctgcgtgcgtccgccgcggagcccggagaccagtaattgcaccagacaggcagcgcatggggggctgggcgaggtcgccgcgtataaatagtgagatttccaatggaaaggcgtaaataacagcgctggtgatccacccgcgcgcacgggccgtcctctccgcgcggggagacgcgcgcatccaccagccccggctgctcgccagccccggccccagccatggaagagctcacggcttttgtatccaagtcttttgaccagaaaagcaaggacggtaacggcggaggcggaggcggcggaggtaagaaggattccattacgtaccgggaagttttggagagcggactggcgcgctcccgggagctggggacgtcggattccagcctccaggacatcacggagggcggcggccactgcccggtgcatttgttcaaggaccacgtagacaatgacaaggagaaactgaaagaattcggcaccgcgagagtggcagaagggatttatgaatgcaaagagaagcgcgaggacgtgaagtcggaggacgaggacgggcagaccaagctgaaacagaggcgcagccgcaccaacttcacgctggagcagctgaacgagctcgagcgactcttcgacgagacccattaccccgacgccttcatgcgcgaggagctcagccagcgcctggggctctccgaggcgcgcgtgcaggtttggttccagaaccggagagccaagtgccgcaaacaagagaatcagatgcataaaggcgtcatcttgggcacagccaaccacctagacgcctgccgagtggcaccctacgtcaacatgggagccttacggatgcctttccaacaggtccaggctcagctgcagctggaaggcgtggcccacgcgcacccgcacctgcacccgcacctggcggcgcacgcgccctacctgatgttccccccgccgcccttcgggctgcccatcgcgtcgctggccgagtccgcctcggccgccgccgtggtcgccgccgccgccaaaagcaacagcaagaattccagcatcgccgacctgcggctcaaggcgcggaagcacgcggaggccctggggctctgacccgccgcgcagccccccgcgcgcccggactcccgggctccgcgcaccccgcctgcaccgcgcgtcctgcactcaaccccgcctggagctccttccgcggccaccgtgctccgggcaccccgggagctcctgcaagaggcctgaggagggaggctcccgggaccgtccacgcacgacccagccagaccctcgcggagatggtgcagaaggcggagcgggtgagcggccgtgcgtccagcccgggcctctccaaggctgcccgtgcgtcctgggaccctggagaagggtaaacccccgcctggctgcgtcttcctctgctataccctatgcatgcggttaactacacacgtttggaagatccttagagtctattgaaactgcaaagatcccggagctggtctccgatgaaaatgccatttcttcgttgccaacgattttctttactaccatgctccttccttcatcccgagaggctgcggaacgggtgtggatttgaatgtggacttcggaatcccaggaggcaggggccgggctctcctccaccgctcccccggagcctcccaggcagcaataaggaaatagttctctggctgaggctgaggacgtgaaccgcgggctttggaaagggaggggagggagacccgaacctcccacgttgggactcccacgttccggggacctgaatgaggaccgactttataacttttccagtgtttgattcccaaattgggtctggttttgttttggattggtatttttttttttttttttttttttttttttttttgctgtgttacaggattcagacgcaaaagacttgcataagagacggacgcgtggttgcaaggtgtcatactgatatgcagcattaactttactgacatggagtgaagtgcaatattataaatattatagattaaaaaaaaaatagccgtgcactcttgaccccgtcagcgtccaacgtggaaaaggcgttacctcttctcccagcgctggccgcctggccactgagggccctttgcaaaaatcacgggtgtagagatggccctgggcgcgctgggagtgtggttgtgtttctgaaggggataaaagagggcacggtggtgccaagatatcagtttggtacctgagctgtttctggttgggaagcgtaaaagccagggagagatccagagagttttcaagtttttgcagatgtaggtggttccagcttttctttctcccctactccatcttctgcgttcccccagttcttttatttctttgttttttatttttgagacagagacttgctttgtcgcccaggctggagtgcagtggcgcaatgtcagctcactgccacctccgcctcccgggttcaagcgatgctcctgcctcagcctcccgagtagctgggactacaggcacctgccaccacccccggctaattttttgtatttatagtagagacggggtttcaccgtgttggccaggctcgtctcgaactcctgacctcaggtgatctgcccgcctcggcctcccaacgtgcccccagttttataaacagcagatagcaacttgtcgtcacagctggcatgggctggacagttgcttgaaatgacctaaccaaaaacattcaagggttctgcccccagatttcgggagatccacgttccatgttctgattggttttctgggaacacagcaaggggtttggtgacctccgagaagatccatctgcatgattggcattagttaccacagcctgcccagagagaaactatcttctcccaacatttactaacatccactggtcaactctcttatttccataacacatttgcatctttctggattcaagcttggtggttttctttcctaacttctgatttagatacttctccctgaggtggggataaaagaaaaaaaaaaacaacttctttttttcttccgcataacactttctatcttgtcactgagctgaactgtagatccatttggacccgtctcatttgtatcttctgatattctttatacaaaccaaaagtccccttcaacattttttatgtcaaaatgttacaaccgctgtaaaatgacggagagagagagaaagaatcccagacattaacggtattagagagtttgcctcattcatccatttttcttaaaagctggaaattaaaaaaaaaaaagagagagagaggcttt

SEQ ID NO: 901 - DNA, 3233 bp, Homo sapiens
cctcctccctctcctcccccacctcctgtcccattgatgtgttattattgggggggctggagcagtaaaaaaagaagaaggaaaaaaagagcggggctctgctggcagaggttgagcgccgggctgacgtgcggcggcgatggaagaacttacggcgttcgtctccaagtcttttgaccagaaagtgaaggagaagaaggaggcgatcacgtaccgggaggtgctggagagcgggccgctgcgcggggccaaggagccgaccggctgcaccgaggcgggccgcgacgaccgcagcagcccggcagtccgggcggccggcggaggcggcggcggaggaggcggaggcggcggcggaggaggcggaggaggtgtaggaggaggaggagcaggcggaggagctggaggagggcgctctcccgtccgggagctggacatgggcgccgccgagagaagcagggagccgggcagcccgcgactgacggagggtagaaggaagccaacgaaagctgaggtccaggctacgctgcttctcccgggcgaggcgtttcggtttcttgtgtccccggagctgaaagatcgcaaagaggatgcgaaagggatggaggacgaaggccagaccaaaatcaagcagaggcgaagtcggaccaatttcaccctggaacaactcaatgagctggagaggctttttgacgagacccactatcccgacgccttcatgcgagaggaactgagccagcgactgggcctgtcggaggcccgagtgcaggtttggtttcaaaatcgaagagctaaatgtagaaaacaagaaaatcaactccataaaggtgttctcataggggccgccagccagtttgaagcttgtagagtcgcaccttatgtcaacgtaggtgctttaaggatgccatttcagcaggatagtcattgcaacgtgacgcccttgtcctttcaggttcaggcgcagctgcagctggacagcgctgtggcgcacgcgcaccaccacctgcatccgcacctggccgcgcacgcgccctacatgatgttcccagcaccgcccttcggactgccgctcgccacgctggccgcggattcggcttccgccgcctcggtagtggcggccgcagcagccgccaagaccaccagcaagaactccagcatcgccgatctcagactgaaagccaaaaagcacgccgcagccctgggtctgtgacgccaacgccagcaccaatgtcgcgcctgtcccgcggcactcagcctgcacgccctccgcgccccgctgcttctccgttacccctttgagacctcgggagccggccctcttcccgcctcactgaccatccctcgtcccctatcgcatcttggactcggaaagccagactccacgcaggaccagggatctcacgaggcacgcaggctccgtggctcctgcccgttttcctactcgagggcctagaattgggttttgtaggagcgggtttgggggagtctggagagagactggacaggggagtgctggaaccgcggagtttggctcaccgcaaagctgcaacgatggactcttgcatagaaaaaaaaatcttgttaacaatgaaaaaatgagcaaacaaaaaaatcgaaagacaaacgggagagaaaaagaggaagggaacttatttcttaactgctatttggcagaagctgaaattggagaaccaaggagcaaaaacaaattttaaaattaaagtattttatacatttaaaaatatggaaaaacaacccagacgattctcgagagactggggggagttaccaacttaaatgtgtgtttttaaaaatgcgctaagaaggcaaagcagaaagaagaggtatacttatttaaaaaactaagatgaaaaaagtgcgcagctgggaagttcacaggttttgaaactgacctttttctgcgaagttcacgttaacacgagaaatttgatgagagaggcgggcctccttttacgttgaatcagatgctttgagtttaaacccaccatgtatggaagagcaagaaaagagaaaatattaaaacgaggagagagaaaaataatattaacacaaaaaaatgccacagacaatgatttctctgagaaattattatggcaaaactgtctggactgctgacagtaaattccggtttgcatgttacttgtattccattgatggtgtgtctcctcccacccccttatctcccatgcactcactccattttcatcttcactatgaaaaacaataccaaaagtatctggaaattgatatatatatatccatatatatatatcatatatttgccatatatatatatatatatatatatatatatatatatatatatttgccctgtctttgatcctggggaacaaaagaaaaaagtcagaaagggaaaaaattacactcattgtcctaagaagacagaggtgggcagaatatgtggggaaaggaaaaagaaaacaagaccaccaaatgaaataatgaaggtacagcgcctcgctgtgccagacacagtaggcgctcaatcagtattagttcccaccattccccttttcttgtgttccttcttgttggtttcctgaagtcctatttgaagacagtggtttatttccccctctctatcccgtcaaattcaccttaaataacacccagctagatacaggcactaggtttgtgtaagatatgttgatacacacgaacaaagtttattttgactataatgtgtggactgactttcaacatttgcattttatctcacaaaggtgtatctattcaagtaaccttttttttttgtttgtttgtttcttttttgtttttttttttcttttggttgtttgtttcaattcatgtagctatttaaactgggataccttggactaagccagtctgtatcccaattcgctagcaagcctaagtttgtggggttttgtttttgtttttgttttaccttctaatttacaagaaagaggaaaagctcttctaactgaactttggtatgcggttgagctttgtaactatttgttctccatgaaaacaaaattatttatatttgacatatttttttctagtgtattaagttattttaaacaaaagatgttatctcatgacgtgttgtcagtacaaaatgtgtcgcctccaattctgttaaaccttttaaataagtgccaagttattaattgaagacactttgcgatcaattgaatgaaaatatcgtttcatttgaaaaaaaaaaa

SEQ ID NO: 902 - DNA, 2003 bp, Homo sapiens
gtcccgtcggtctcggcgccgggaagaggcggtggcgctgcccgcggtggcgggggttggcgacggagcgcgttggtgccaggaccggggtccgaggcgcgctctccgcccacagaaatgagccgtcagactgctacagcattacctaccggtacctcgaagtgtccaccatcccagagggtgcctgccctgactggcacaactgcatccaacaatgacttggcgagtctttttgagtgtccagtctgctttgactatgtgttaccgcccattcttcaatgtcagagtggccatcttgtttgtagcaactgtcgcccaaagctcacatgttgtccaacttgccggggccctttgggatccattcgcaacttggctatggagaaagtggctaattcagtacttttcccctgtaaatatgcgtcttctggatgtgaaataactctgccacacacagaaaaagcagaccatgaagagctctgtgagtttaggccttattcctgtccgtgccctggtgcttcctgtaaatggcaaggctctctggatgctgtaatgccccatctgatgcatcagcataagtccattacaaccctacagggagaggatatagtttttcttgctacagacattaatcttcctggtgctgttgactgggtgatgatgcagtcctgttttggctttcacttcatgttagtcttagagaaacaggaaaaatacgatggtcaccagcagttcttcgcaatcgtacagctgataggaacacgcaagcaagctgaaaattttgcttaccgacttgagctaaatggtcataggcgacgattgacttgggaagcgactcctcgatctattcatgaaggaattgcaacagccattatgaatagcgactgtctagtctttgacaccagcattgcacagctttttgcagaaaatggcaatttaggcatcaatgtaactatttccatgtgttgaaatggcaatcaaacattttctggccagtgtttaaaacttcagtttcacagaaaataaggcacccatctgtctgccaacctaaaactctttcggtaggtggaagctagacacatgaaggtaaataaaaagaaaggctgttaaatacaggaaacagttgcatgtagtaacactaatatatttaaaaataagtcaacagtaaaccactgaaaaaatatatgtatatacacccaagatgggcatcttttgtattaagaaaggaagcattgtaaaataattctgagttttgtgtttgttgtagattgattgtattgttgaaaaagtttgtttttgcgtgggagtgtgtgcctgcgtgggtgtgtgcgtgtttgggtttttttcctttaactgacaagccatcttgagtggtcatgggccactgcttttccctttgtgagtcaatacatagtgctgctgtgtgctttttttgtgtgtatttgctaatttttattaattttagtttttcattaaataaatttgacttttctgtaattcaggtttttcctttttttgtaccattttaaagttagtatcttttgatatgcatatttgtttatggtaaaaaatttataacgtgttcaatattttcttttcccccattaatcagttcattagaaatattttaaaatcagctattttgtgaagccatgagttccagaaagtaaaggtgacatcggaaaaataatcaaaagctatttaaagcatctataaggtgctctctttctgtcttctacagatgagtcacacctttgagcttaatctttgaaaggttagagaataaattgatttttataaatactgcaaatcaggcttttgtttcctttttcagatatcttggacaaatcacatattttaaaatttgttcttgtatttattggttttgcagaagaaggcatcgtcatgcacagtatttgtaattaaaagcaaatcatttgtttaaaaaggcagtttgcaaaaaatgtttttggtcttttataattctcattaaaagaatatctggc

SEQ ID NO: 903 - DNA, 2632 bp, Homo sapiens
agctgagggacgcgtcagccaggcaccccggggtgtggccagaggacttcggcgacgcttccccgagagtagcccccctcctcaacccagaaaagacaaccccgcggggctgcagcgagccaggcatgctcactggcgcaggcccggcccgcagcccgagcaggaagcgccggcgctaggcggccccctgcgctgccagctggagccgggcggagccagcgccccggcgcagggtggctctgccagtccccgcgcgcctgggcggccgcacacgtgtccaggcgtcacgtccgcgcgcgcccccggggcttgcgtcagcggctgttccagaagcgggtgggccagggctctgcgcaccgctggggttcggggcccgggacgccgccgggaggagggcaccgcgcggggtccgacgcggaggcgtgctcggaacgccgggggctgcggagtgcatcagcgcggtccagccctccgcctgccgggcgccgagcgtctccgccgcccggacctgggctgggcgccgtggcgttgcctcggagctcgctgcccgcggggcgcgcaccgccttgacccgggcggccccgcggcaggcaggcgcccgcagttccatggttggttcggagcgcgatgagccgcccgtcctccaccggccccagcgctaataaaccctgcagcaagcagccgccgccgcagccccagcacactccgtccccggctgcgcccccggccgccgccaccatctcggctgcgggccccggctcgtccgcggtgcccgccgcggcggcggtgatctcgggccccggcggcggcggcggggccggcccggtgtccccgcagcaccacgagctgacctcgctcttcgagtgtccggtctgctttgactatgtcctgcctcctattctgcagtgccaggccgggcacctggtgtgtaaccaatgccgccagaagttgagctgctgcccgacgtgcaggggcgccctgacgcccagcatcaggaacctggctatggagaaggtggcctcggcagtcctgtttccctgtaagtatgccaccacgggctgttccctgaccctgcaccatacggagaaaccagaacatgaagacatatgtgaataccgtccctactcctgcccatgtcctggtgcttcctgcaagtggcaggggtccctggaagctgtgatgtcccatctcatgcacgcccacaagagcattaccacccttcagggagaagacatcgtctttctagctacagacattaacttgccaggggctgtcgactgggtgatgatgcagtcatgttttggccatcacttcatgctggtgctggagaaacaagagaagtacgaaggccaccagcagttttttgccatcgtcctgctcattggcacccgcaagcaagccgagaactttgcctacagactggagttgaatgggaaccggcggagattgacctgggaggccacgccccgttcgattcatgacggtgtggctgcggccatcatgaacagcgactgccttgttttcgacacagccatagcacatctttttgcagataatgggaaccttggaatcaatgttactatttctacatgttgtccatgatgtgactttcgtaaaccttcaaaattatttgggcatagtgctctatgtttaataaaggtttttatagatgttttattccatatgtcttcacaagtcaggacccacaattacccgtgttttgtttgaacagcagtgtcccatctggcttcgacccaacaaagttcattaacctgggatgaatggggttggcctgttggtgatttggatgctgttctgtgatctaaaacaactcttattgaattgtatttactccctaaacaacacttgacaggctgttgcacagggcttctatagatcagtgtgttaggaatgggaggccccttcctgcctgccttcccatattggtcccttgacattgacaaaagcacagtgactgtcagcagattcctttacttttgtttgtgggaggtaggaattgttttaatgcattttaaacagtgtttctgaaattggatggctggctaatagacactgaatcacccggagtgcttatcttaaaattgcagatttagggagcctgccaatttaacagtctcatcaggtgattcttttcaacagtaatgtttgagaattactgggttaaattgtgggaaagggtccagattttaaaggtgctttaaggttgccctctgccgatactgtttgtctttctactgtttcatcccctaacttcccccaaccctcaaattaaaactagaactatagatccacatgaacgcacgcctgagatttggccactcacctatgttttgggtggattgcctaggaaagcaagtcatatggccattgatagttctcatgtaattagttttgctcaccactagtacagatgacccgtttacacgtggcttccctcggaagccctcctcaacagtagctggtgtgaaagactaaatcagtagagttggaaaagctttataaccggtgtgtcatatgcttgctatttaaagctgtgtgttggttttgtttttctgccacattcactagttttttaataaatattttccaaaaatggataaaaaaaaaaaaa

SEQ ID NO: 904 - DNA, 3995 bp, Homo sapiens
cgaattttcaaagaacatattttccgttcacccccgctggtcttttactgccatcaatacactgttcttggtgcaaatacttcagcctctttattcaaagtatgttttatgtttttgccaaatatgatctctaattgaaagtttatttttggttttggatgaatctgcggagcttaagttgtgagaagaaagggggaacaagacacaatgaaagaaaagtccaaaaatgctgcgcggactaggagggagaaggaaaacagtgaattttatgaactggctaaattactgcctttgccctcggctatcacctcgcagctggacaaagcatccataatcagactcacgaccagctatctcaaaatgagagtggtgttcccagaagggctcggcgaggcgtggggccactcaagtcggaccagccccctggacaacgttggccgagaactgggctcccatctgctccagaccctggatggcttcatcttcgtggtagccccagatgggaagatcatgtacatctcagagacagcctcagtccacttgggtctttctcaggtagagctgaccggaaacagcatttatgaatacattcacccggcagaccacgacgagatgacggcggtgctcaccgcccatcaaccctaccactctcacttcgtgcaggagtatgagatcgagcgctccttcttcctgaggatgaagtgcgtcttggccaagcgtaacgccggcctcacctgtggcggctacaaggtcatccactgcagcggctacttgaagatccgccagtacagcctggacatgtcccccttcgacggctgctaccaaaacgtgggcctggtggccgtgggccactcgctgcctcccagcgccgtcacggagatcaagctacacagcaatatgtttatgttccgcgccagcctggacatgaagctcatctttctggactccagggtggcggagctgacggggtacgaacctcaggacctgattgagaagactctgtaccaccatgtgcacggctgcgacaccttccacctgcgctgcgcgcaccatttgctgctggtgaagggacaggtgaccaccaagtactacaggttcctggcgaaacacggcggctgggtatgggtgcagagctacgcgaccatcgtgcacaacagtcgctcctccaggccacactgtatcgtcagcgtcaactatgtcctcacagacacagaatacaaagggctgcagctctccctggatcagatctcagcctccaaaccagccttctcctataccagcagctccacccccaccatgactgacaacagaaagggggccaaatcccggctctccagctcaaagtcaaaatccaggacttccccataccctcagtattcgggatttcacacagaaagatcggaatctgatcatgacagccagtggggcggaagtcccttgaccgacacggcctctccgcagcttctggaccccgccgataggcctggctcccagcacgacgcatcgtgcgcctacagacagttttcggaccgcagctctctctgctatggctttgcgcttgaccactcgaggctggtggaagagaggcatttccatacccaggcctgtgaaggaggccgatgtgaggcaggcaggtacttcctgggaacgccgcaggccgggagggagccctggtggggctctcgcgcagccttgcccctgacaaaggcctccccagaaagcagagaagcctatgaaaacagcatgcctcacatcgcttcagtccacaggatccatgggcgaggtcattgggatgaagatagtgtggtcagttctccagaccctgggtcggccagtgaatcaggtgaccgatatcgtactgagcagtatcaaagtagcccacatgaacccagcaaaattgaaactcttataagagccactcagcaaatgattaaagaagaagagaacagattacagctaaggaaagccccctcagaccaactggcttccattaatggggctgggaaaaaacactccctgtgttttgcaaactaccaacagcccccaccaacaggtgaagtctgccatggctctgctcttgccaacacttcaccatgtgaccatatccagcagagagagggaaaaatgttgagcccccatgaaaatgactatgacaacagtcccaccgcactatctcggataagtagtcccaattcggatcgcatttcaaaatccagtttgatcctagctaaagactatctgcattcggatatatctcctcatcagacagcaggagaccaccctactgtctctccaaactgctttggctctcaccggcagtattttgacaagcatgcttacacattaactggatatgccctggagcacttatatgacagcgaaaccattagaaactattccttgggctgtaatggctcacactttgatgtaacttcccatctgaggatgcaaccagacccagcacaaggacacaagggaacatctgttataataaccaacggaagctgatgttttgctgaaatattttgttctttaaggatctctgaaacatatttatagtttaataccccattaccagcatttactatgccacagattgttagagagtataacttaagttactgggtatttgatacgtgttcctataaaatcaaagaaaacatagcactagcattcagggttatacacagaaaagggagctaaattgaatacacaaatttcccctctaattatatgggaaccagaatagataaattttgacttgaaaaatattcatgtagatcaagtgtgcatatatactacatgagaggactgatgaatgacaacattgcattgtgactatccagtgatcctcaaacacacaaactattacttacaaactgcggtatacattttacatatggaaatataggctatgtaatgtaaatacatcaaaaatgggtaattttctttgactctgtcacactaaacttcttaacgaaatttccattcccaaaataactgagaaagagagagatacatcttataaactgacttctttgtggtttcaaatcagccagctcatttggttcaggcataaattagagaaatggttctggatatggtgcaaaaatgagttttcacctggtatccattataaacaatcaggaagaggtaatttttcaccttgcttttcagttagacaaggaccaggattgcactgacatggcgctgagggtttttctaagtaagaacactgagatattgggacacacatcaaaaacctggagtgctcaattggaagtagttctatgaatatggaaaggccagaggcagagtgaaataaaatgctatctcaaagtttaacacaatttaagggctcagcataagtaaacaacatatttggggtttgcttgtaaaaccaactaaataaaaaattcaaaccaattcacccagaaaaaagaccaataggtgcaaaaataaaaggaaaaccagtgaagtgccacatgacagcagtgttaagtgtttgaaaacgtttcaaagcacatatgtgccaatgtgacaacatgtggaaagcctcaggagagagtctaagataaaagcttaggctgatagacaagtagttaagagctaagagcagtactctgaaggaataggcaaaatgtttattttccttattgtttgtaaacaacaaacttggtcttacatctgtgtggtatagtagaaaggccagctgactagatctctggattctaattttggccctacctgtaacttaattttgtgaccacagttgtaccattcaccgtgcctgggctctagtttcctggtttgtaaggcagccccagcgttcatgttctgtgatagagcagaactgaacttattacctaattaactctctgctatgagttgtcaagactgatcattctgttttttctgtacacagaagtttagatgctttgtgacttaagcaggtgtgtgggctcctttaggcaggttacagttaactttctaga

SEQ ID NO: 905 - DNA, 4177 bp, Homo sapiens
ggggctccgcgggcctggagcacggccgggtctaatatgcccggagccgaggcgcgatgaaggagaagtccaagaatgcggccaagaccaggagggagaaggaaaatggcgagttttacgagcttgccaagctgctcccgctgccgtcggccatcacttcgcagctggacaaagcgtccatcatccgcctcaccacgagctacctgaagatgcgcgccgtcttccccgaaggtttaggagacgcgtggggacagccgagccgcgccgggcccctggacggcgtcgccaaggagctgggatcgcacttgctgcagactttggatggatttgtttttgtggtagcatctgatggcaaaatcatgtatatatccgagaccgcttctgtccatttaggcttatcccaggtggagctcacgggcaacagtatttatgaatacatccatccttctgaccacgatgagatgaccgctgtcctcacggcccaccagccgctgcaccaccacctgctccaagagtatgagatagagaggtcgttctttcttcgaatgaaatgtgtcttggcgaaaaggaacgcgggcctgacctgcagcggatacaaggtcatccactgcagtggctacttgaagatcaggcagtatatgctggacatgtccctgtacgactcctgctaccagattgtggggctggtggccgtgggccagtcgctgccacccagtgccatcaccgagatcaagctgtacagtaacatgttcatgttcagggccagccttgacctgaagctgatattcctggattccagggtgaccgaggtgacggggtacgagccgcaggacctgatcgagaagaccctataccatcacgtgcacggctgcgacgtgttccacctccgctacgcacaccacctcctgttggtgaagggccaggtcaccaccaagtactaccggctgctgtccaagcggggcggctgggtgtgggtgcagagctacgccaccgtggtgcacaacagccgctcgtcccggccccactgcatcgtgagtgtcaattatgtactcacggagattgaatacaaggaacttcagctgtccctggagcaggtgtccactgccaagtcccaggactcctggaggaccgccttgtctacctcacaagaaactaggaaattagtgaaacccaaaaataccaagatgaagacaaagctgagaacaaacccttaccccccacagcaatacagctcgttccaaatggacaaactggaatgcggccagctcggaaactggagagccagtccccctgcaagcgctgctgctcctccagaactgcagccccactcagaaagcagtgaccttctgtacacgccatcctacagcctgcccttctcctaccattacggacacttccctctggactctcacgtcttcagcagcaaaaagccaatgttgccggccaagttcgggcagccccaaggatccccttgtgaggtggcacgctttttcctgagcacactgccagccagcggtgaatgccagtggcattatgccaaccccctagtgcctagcagctcgtctccagctaaaaatcctccagagccaccggcgaacactgctaggcacagcctggtgccaagctacgaagcgcccgccgccgccgtgcgcaggttcggcgaggacaccgcgcccccgagcttcccgagctgcggccactaccgcgaggagcccgcgctgggcccggccaaagccgcccgccaggccgcccgggacggggcgcggctggcgctggcccgcgcggcacccgagtgctgcgcgcccccgacccccgaggccccgggcgcgccggcgcagctgcccttcgtgctgctcaactaccaccgcgtgctggcccggcgcggaccgctggggggcgccgcacccgccgcctccggcctggcctgcgctcccggcggccccgaggcggcgaccggcgcgctgcggctccggcacccgagccccgccgccacctccccgcccggcgcgcccctgccgcactacctgggcgcctcggtcatcatcaccaacgggaggtgacccgctggccgcccgcgccaggagcctggacccggcctcccggggctgcggcgccaccgagcccggcaaatgcgcacgacctacattaatttatgcagagacagctgtttgaattggaccccgccgccgacttgcggatttccaccgcggaggccccgcgcgccggtgccgagggccgaggagcgcccgggtccgggcaggtgaccgcccgcctctgtcctgcgagggccggtgcgacccagttgctgggggcttggtttcctcaccttgaaatcgggcttcacgcgtcttgccttgtccccaacgttccacaacagtcccgctgggggattgaagcggtttcactccgcaaatatcctccactttcaggagggaaaacccaccctaccacagtccgctcttccaagtggacggcagacctgggaggggacgcctgtgtcacgagcccttttagatgcttaggtgaaggcagaagtgatgattgtaagtcccatgaatacacaactccactgtctttaaaagtcattcaagagtctcattatttttgtttttatttaaccctttcttcaatacaaaaagccaacaaaccaagactaagggggtgaccatgcaattccattttgtgtctgtgaacataggtgtgcttcccaaatacattaacaagctcttacttccccctaacccctatgaactcttgataacaccaagagtagcaccttcagaatatattgaataggcattaaatgcaaaaatatatatgtagccagacagtttatgagaatgaccctgtcaagcttcattattacgtggcaaaatccctctggcccacacagatctgtaattcactaggctcgtgtttgctacaaatagtgctaataaagttaaattgcacgtgcaatacggaacactgtcaatggactgcaccttgtgaaggaaaaacatgcttaagggggtgtaatgaaaatgatgtagacattttaagcattttctacacagcgagaaaacttcgtaagaacatgttacgtgtgcaacaggtaaacagaaatcctttcataaagcaccagcagtgtttaaaaaatgagcttccattaatttttactttttatgggttttgcttaaagatctcaacatggaaaaatcctgtcatggctctgaactgcacaatgcattgaaccgccgtccttcaattttcttcacactatcaacactgcagcattttgctgctttatcaaaatggtttattttaggaaactttttccacctttctgaatggaaagaggttttcacaaatgttttaaactcatcgttctaaaatcaagtgcacctacaccaactgctctcaaaatgtgaactgacttttttttttttttttttgccaaccctgtgtcacttagtgaggacctgacacaatccctacagggtgtctgtcagtgggcctcatggtaagagtcacaatttgcaaatttaggaccgtgggtcatgcagcgaaggggctggatggtaggaagggatgtgcccgcctctccacgcactcagctatacctcattcacagctccttgtgagtgtgtgcacaggaaataagccgagggtattatttttttatgttcatgagtcttgtaattaaaccgtgattcttgaaaggtgtaggtttgattactaggagataccaccgacatttttcaataaagtactgcaaaatgcttttgtgtctaccttgttattaacttttggggctgtatttagtaaaaataaatcaaggctatcggagcagttcaataacaaaggttactgttgagaaaaaagaccctatcatagatttacaagtgacaacgtggacaggcgtaacagagtgtgtatgtacttgaaaatgtgtactagtgaaaacgtccttgtctaaacaaacttcgttttcataacctagaacatgaaggaagattcttacacgagctggcttcaggacggccagggctgagtgtgaagtcagcagagctgttactgtggcaacctaatattgtgacctccatcttgaagagtctgcacatttaagctggggatagcgtttcttgacttctgtgaggctccggcaggggaagaggaagcattttaatacatatgc

SEQ ID NO: 906 - DNA, 5037 bp, Homo sapiens
ggcgcagctccgacttcggacatggcgcacgctggcggtggcagcggtggcagcggtgccggcggccccgcgggccgggggctgagcggcgcccgctggggtcgctcgggctccgcaggccacgagaagctgccggtgcacgtagaagacgccctcacctatctggaccaggtgaagatccgctttggcagcgaccctgccacctacaacggcttcctggagatcatgaaggagttcaaaagccagagcatcgatactcctggagtcatcagacgtgtctcgcagctcttccacgagcaccctgacctcattgttggattcaacgcttttcttcccctcggatatagaatagacattcccaagaatggcaagttaaacatacagtcgcctctgacaagccaggagaattcgcacaaccacggggacggtgcagaggacttcaagcagcaggtgccgtataaagaggacaaaccccaggtgcccctggagtccgattccgtggaattcaacaacgccatcagctatgtgaataagattaaaacccgcttcctagaccacccagaaatctacaggtcattcctggagatcctgcacacgtaccagaaggagcagctgaacacgaggggccggccattccgaggcatgtctgaagaggaggtgttcaccgaggtggccaacctcttccggggccaggaggacctgctctcagagtttggacagttcctgcccgaagccaagcggtctctgttcacaggaaacgggccgtgcgagatgcacagcgtgcagaagaacgagcacgacaagaccccggagcacagcaggaagcgctcccggccctcgctcctccgccccgtgtctgcacccgccaagaaaaaaatgaaacttcgtggtaccaaagacctgtccatcgctgcagtggggaagtacgggactctgcaggaattttctttctttgacaaggtccgccgggtgctgaagagccaggaggtgtatgaaaacttcctccgctgcatcgcactcttcaaccaggagctggtgtctggctctgagctcctgcagctcgtcagcccatttctggggaaatttccagaactctttgcacagttcaagtccttcctgggggtaaaagagctgtccttcgcgccacccatgagcgacagatccggggacgggataagccgggaaattgattatgcatcctgcaagcgcataggatccagctaccgggcactccccaaaacctaccagcagcccaagtgcagtgggaggacagccatctgcaaggaggtactgaacgacacctgggtctccttcccttcctggtctgaggactccacgttcgtcagctccaagaagacaccgtacgaggagcagcttcaccgctgtgaggacgagcgcttcgagttagacgttgtcctggagacgaacctggccacaatccgtgtgttggaaagtgtgcagaagaagctgtctcggatggcgccggaagaccaggagaagttccggctggacgactccctgggaggcacgtcggaggtgatccagcgccgtgccatttatcgcatctatggcgacaaggccccggagatcatcgagagcctcaagaagaaccctgtcaccgctgtccccgttgtcctgaaaagactgaaggccaaggaagaggagtggcgggaggcccagcagggcttcaacaagatctggcgggagcagtatgagaaggcgtacctcaagtcccttgaccaccaggctgtgaacttcaagcagaacgacaccaaggccctgcgctccaagagcttgctcaacgagatcgagagcgtctacgacgagcaccaggagcagcactcggagggccgcagtgccccctctagcgagccgcacctcatctttgtgtacgaggaccggcagatcctggaggacgcagcagcgctcatcagctactacgtgaagcggcagccggccatccagaaggaggaccagggcaccatccaccagctgctgcaccagttcgtgcccagcctcttcttctctcagcagctggacctgggcgcctccgaggagtcagctgatgaggaccgggacagcccccaggggcagaccacagaccccagtgagcggaagaagccggcgccaggaccccacagtagccccccagaggagaagggggccttcggggatgccccggccactgagcagccacccctgccgcccccagccccgcacaagcccctggacgatgtctacagcctattttttgccaacaacaactggtacttcttcctgcgcctgcaccagaccctgtgctccaggctgctgaagatctaccgccaggcgcagaagcagcttctggagtatcggaccgagaaggagcgggagaagctgctgtgtgagggccgcagggagaagggcagcgaccccgccatggagctgcggctgaagcagcccagtgaagtggagctggaggagtactacccggccttcctggacatggtgcggagcctgctggagggcagcatcgaccccacgcagtacgaggacaccctacgcgagatgttcaccatccatgcctacgtgggcttcaccatggacaagctggtgcagaacattgcgcggcagctgcaccacctcgtgagcgatgacgtctgcctgaaggtggtggagctctacctgaacgagaagaagcggggtgccgctggtgggaacctgtcctcccgctgcgtccgcgctgctagggagaccagctaccagtggaaggctgagcgctgcatggccgacgagaactgcttcaaggtgatgttcctgcagcgcaaagggcaggtgatcatgaccatcgagctcctggacaccgaggaggcccagacggaggaccctgtggaggtccagcacctggctcggtacgtggagcagtatgtggggaccgagggcgcgtccagctcgcccactgagggcttcctcctgaaacctgtgttcctgcagaggaacctcaagaagttccgccgccggtggcagagcgagcaggcgcgggccctgcgcggtgaggccaggagctcctggaagcggctggtgggcgtggagagcgcctgcgacgtggactgccgcttcaagctcagcactcacaagatggtgttcatcgtgaactccgaggactacatgtaccgtcgcgggaccctctgccgggccaagcaggtgcagcccctggtcctgctccgccaccaccagcactttgaggagtggcacagccgctggctggaggacaatgtgacggtggaggcggctagcctggtgcaggactggctgatgggtgaggaggacgaggacatggtaccctgcaagacgctgtgtgagacagtgcacgtgcacggcctgcccgtgacccgctaccgcgtgcagtacagccgccgcccggcctcgccctgacccgccctcatgggcaccgggcaggcgcctcacagagcacagacgtgccctcggccttggtcgtgtcggggccgttttcttgaacgacgtgagaggcatctcccagcccctctgctgccggacagcgcactccagggcaggacgccgcccccgtggctcccggtctcctgtgggcctgctgtgtgccaaacctgagctacctgcacccgagccctggggctcagccccaccacaggggcgggtggacgtgctggccgaggaacaagcaatcatgtttgcgtccccgtccgtcacatgtgccaaatccctggcaggcagatggctcctgccccatattcttgccgtgtcttggaaaagtcacaggtgacagccctcctgaggcccacactttggagggggtccatgtccaagagaccctgacaaggaaggagttgagccctgggtaggcttgcttgaaaagtgagtccttccagaatattctcagagctgccagaaacatcatctgagggtttgggcatcagctctgcctggctggtgttcaggccctcagtcactttggaagtgagaagaacccttcagccaaacctttgggatcccattttgaagtccagagctggagcaggcgggcagtgccctgggagaccccgctctggataagacacccaaccccaactccagcagctggactctgggcccacaaggggagggaccccagccagtattccctcagagccggcacgaccctgctgtggggcggcgggcccagtcgtgttcctgcagtgggcaccctaggcgtatgtgtatacacgcacagatatttattcctttcgcttttagtggttgttatttctgtagcagccaagtcctgcgactccctggggctgagatctccctttgtggaactccgagagccgccctgacagtcccagccgccacccaaggagccccatccgcccacccaccctgggacccacgcggccactccagggatcattgttgtccttttgtgaggggctgaggcgactgtcccatggaggcatccaaggctttctgtgccaagaatcccaagtgactggggctggggaccacttctccaggcctctctccccgaccatgagagcccctggccctggcccctgcacaccagtaggcccagaataaccgccacccttgccatcctgcaacagctggactcaagtttccaggaagtggagatgtgtttctagaagtttcctgtggaacctggaggctcctgatgcctttgactccaggctgggcgattccgatgctgacccgtcctcctgggctccccacccccgctccccaagtgtcacacaggcactttgtacacatcctggttttctaagaagggaacttgccatcaagattcctgtaccaggcccacggccgtctcgggcagagccacctgggccccgggtgcagccggagaccccgccgagcccctcctcccagtattcccatccccgcatgcttctagggagcgcctcttttccgttcttgaggaatttctgttctggggcttgtccttcctttgcagctgttttgaatgtagttttccttttctatttatttgcacattaaagttaataattgaatattgac

SEQ ID NO: 907 - DNA, 2687 bp, Homo sapiens
cggaggcagcaaggccttaaaggctactgagtgcgccggccgttccgtgtccagaacctcccctactcctccgccttctcttccttggccgcccaccgccaagttccgactccggttttcgcctttgcaaagcctaaggaggaggttaggaacagccgcgcccccctccctgcggccgccgccccctgcctctcggctctgctccctgccgcgtgcgcctgggccgtgcgccccggcaggccccagccatgtcgatgctgccgtcgtttggctttacgcaggagcaagtggcgtgcgtgtgcgaggttctgcagcaaggcggaaacctggagcgcctgggcaggttcctgtggtcactgcccgcctgcgaccacctgcacaagaacgagagcgtactcaaggccaaggcggtggtcgccttccaccgcggcaacttccgtgagctctacaagatcctggagagccaccagttctcgcctcacaaccaccccaaactgcagcaactgtggctgaaggcgcattacgtggaggccgagaagctgcgcggccgacccctgggcgccgtgggcaaatatcgggtgcgccgaaaatttccactgccgcgcaccatctgggacggcgaggagaccagctactgcttcaaggagaagtcgaggggtgtcctgcgggagtggtacgcgcacaatccctacccatcgccgcgtgagaagcgggagctggccgaggccaccggcctcaccaccacccaggtcagcaactggtttaagaaccggaggcaaagagaccgggccgcggaggccaaggaaagggagaacaccgaaaacaataactcctcctccaacaagcagaaccaactctctcctctggaagggggcaagccgctcatgtccagctcagaagaggaattctcacctccccaaagtccagaccagaactcggtccttctgctgcagggcaatatgggccacgccaggagctcaaactattctctcccgggcttaacagcctcgcagcccagtcacggcctgcagacccaccagcatcagctccaagactctctgctcggccccctcacctccagtctggtggacttggggtcctaagtggggagggactggggcctcgaagggattcctggagcagcaaccactgcagcgactagggacacttgtaaatagaaatcaggaacatttttgcagcttgtttctggagttgtttgcgcataaaggaatggtggactttcacaaatatctttttaaaaatcaaaaccaacagcgatctcaagcttaatctcctcttctctccaactctttccacttttgcattttccttcccaatgcagagatcagggaaaaaaaaaaaaaaaaacccaaacaaacaaaagcacccaggcacccagtctgagttctgggcaactgatacgcctgtttcagcagcctttcttttttttcaatgaatgggaattgcaaatcaactggattttcattatttccttttaatttatatatggagaaatgtgaagagggaaaggaaatggaaagagaaagagaaagggagataaaaatagtgaaaataagagcctccaggctcagaagaactgattacattcttaaggtgaacaggaaaaatacaatctataactttctttgatgaggaaaaattaagtttacatttttcatatttagtgttaaacaatttaatgtagattaaaataaaagaccagtattaggaggaaaaaacaagtgcctaaatgtcttaatgctctctatgtgagacagaaatagacgtgaccattagtaatgcaactatttttgtcaaatttagtgggattttttggttgttgtttgttttcttgggttttttttttttaaatgacaaactctaaaaatgtaccaatgtgaaaaaacactttcctgaatgccattactcatgccctcaaagctttcatatctgtagcctactcctgtaaagggtttctcctgtttctagtttctagtttgcaaaggtatgccaacgaatctggcaacctggtatttgttactaaaacagcatgtgttttcaggtttcttttctattgtacctaaagcagtctaaattaaaacttagtagaacaccaggagtatgattctgtttctgaaaggtgagtggtgtattgctgtcattgggccctatttttttttttaaatatatttttctttcttacttaatggtggctgtgaattgcagggtactttgaaggccatcatctgaaccaagagtagtaactagattaattatatgacagaaagagtgaatttagccttggggtatttattaacttctattatttagatatgcaattttgtttaccactatctcttcacagcattcatatgttaactaagctcttttgtgttaacaagtttatgacaagactgtgaaagtaaaaataatttatctgcttgaagacaaaaaagggaaggagaacaaggatagaaacattgtgaattaatttgtacaaatagaaagcagaccagcaggacaggagctcttttgcagtgctgccggatggtgtctagaaaaatcccagtaatcatgtaggctccatattatttttgcctggggcaaaatgatgtatcttctgtatttagcttttaaaattagtgaaacaaatggcattatttattaaaattctactcaggataaca

SEQ ID NO: 908 - DNA, 2178 bp, Homo sapiens
gcgagggaacggcgggcgggcgcggagcatgcggagcggcgccccgggcggcccccgggcttgggcgagggcttgggccaggcgcgcgggccgttggggttcggagcttcgtgggacccgcggccggcgcggggacgtacggcagtgactcggggctcaccgggggccagtgccgggccagggggccagccccgcccgcgtctcggcccggacggcccggcgaggaagctcccatgcgggaccgcgcggcccggtgagggcgcgcgcgggcgggcggggacgcagccggcaccatgtccatgctgcccaccttcggcttcacgcaggagcaagtggcgtgcgtgtgcgaggtgctgcagcagggcggcaacatcgagcggctgggccgcttcctgtggtcgctgcccgcctgcgagcaccttcacaagaatgaaagcgtgctcaaggccaaggccgtggtggccttccaccgcggcaacttccgcgagctctacaagatcctggagagccaccagttctcgccgcacaaccacgccaagctgcagcagctgtggctcaaggcacactacatcgaggcggagaagctgcgcggccgacccctgggcgccgtgggcaaataccgcgtgcgccgcaaattcccgctgccgcgctccatctgggacggcgaggagaccagctactgcttcaaggaaaagagtcgcagcgtgctgcgcgagtggtacgcgcacaacccctacccttcaccccgcgagaagcgtgagctggcggaggccacgggcctcaccaccacacaggtcagcaactggttcaagaaccggcggcagcgcgaccgggcggccgaggccaaggaaagggagaacaacgagaactccaattctaacagccacaacccgctgaatggcagcggcaagtcggtgttaggcagctcggaggatgagaagactccatcggggacgccagaccactcatcatccagccccgcactgctcctcagcccgccgccccctgggctgccgtccctgcacagcctgggccaccctccgggccccagcgcagtgccagtgccggtgccaggcggaggtggagcggacccactgcaacaccaccatggcctgcaggactccatcctcaaccccatgtcagccaacctcgtggacctgggctcctagaacccatttgccttgatgagcttgccttttgtgacttgacactggggacgtggagtggcggtgtccaggggcgccccgcccctgcggccccaccaggtactgaaagacccgcaggctgagcgggtagaacagccgggtagggcagatagctgtctatgttggttcttgtttgggatttattttcaacaagttacttttaggatccttttggggctggagactgagtcttgaaccacagaagggaataaattatacaccactgtcattctctctctccctctgtctcttccttttaccctctcttgtcttgccttttccccctttcctcttcctttcccttccttctcttttcttttttctgctttctgtctttctccctctccttgtattgctttccttctagatttctagcttgccaccgttcattctctccttctgtctctccctttctctctccttctctgtttctcctctcttctctcctgccagtctcttgtactctgtgtcctggtccctccgtatgtacccctgtctttctcctcctgactggtggtctatctgcccctacctctggccctcgctttaccggagtagggggtgggagagggaagaggagagaaaatacagggactttgaacctaggccatctcctgaggccttttccctcgcccatgtgggtcagtgggagctgcaggtgtcagcttttcgtctagtaacttaagtgagagagaaagggcagcgccacagaagcccctaaacgccgcctcgtcatacgcccctcctccttctctcttggcgaggccccgccacaccgcgctcttcctcccgggactgtgactacagcgctcccggctgagcgcgccccccgagccgccgacttgccgtctccccgtaatgccctcatgtgaatgttcttcgggaaatatttctgcttttattttataataaaattagaaatcataaatatataaatggttatatgccaaaaaaaaaaaaaaaaaaaaaaaaa

SEQ ID NO: 909 - DNA, 2533 bp, Homo sapiens
gcgggtgtgtgtgtgtgtggatgtgtgtggggtgtgggtgtcccttacgcccttcctcctctccctcctcctcctgctcccccctcctttccttctcctcctcccccctctcctctccctcctcctggtcctcatcgcccctctcctcctcttcctcccctctctcttcctctccctgaattttctcctctcctctcaggtcagtccatggtattccgctcccccctagacctctattcctcccacttcttgttgccaaacttcgccgattctcaccaccgctccatacttctggcgagtagcggcggcgggaacggtgcgggaggcggcggcggcgcgggaggcggcagcggcggcgggaacggtgcgggaggcggcggtgctggcggagcaggcggcggcggcggcggcggctccagggcccccccggaagagttgtccatgttccagctgcccaccctcaacttctcgccggagcaggtggccagcgtctgtgagacgctggaggagacgggcgacatcgagcggctgggccgcttcctctggtcgctgcccgtggcccccggggcgtgcgaggccatcaacaaacacgagtcgatcctgcgcgcgcgcgccgtggtcgccttccacacgggcaacttccgcgacctctaccacatccttgagaaccacaagttcaccaaggagtctcacggcaagctgcaggccatgtggctcgaggcgcactaccaggaggccgagaagctgcgcggccgcccactcggcccggtggacaagtaccgcgtgcgcaagaagttcccgctgccacgcaccatctgggacggcgagcagaagacgcattgcttcaaggagcggactcggagcctgttgcgggagtggtacctacaggacccctaccccaaccccagcaagaaacgcgaactggcgcaggccaccggcctcactcccacacaagtaggcaactggtttaagaaccggcggcagcgcgaccgcgccgcggcggccaagaacaggctccagcaccaggccattggaccgagcggcatgcgctcgctggccgagcccggctgccccacgcacggctcggcagagtcgccgtccacggcggccagcccgaccaccagcgtgtccagcctgacggagcgcgcagacaccggcacctccatcctctcggtaacctccagcgactcggaatgtgatgtatgatagccaaggccgccctcctccctctccttcccctcctcccccactccttcccctccgcctcctagccctcctcctcttcctcctcttccttctcctcctccatccccagaacaaaccgaaatcaggatacccaaccatacacacatacaagtccacacacactcccaccccagccaaaaatatataaaaaacaagaaaataacaaattaaccgcaaactatcaacaacccccaaccaccatctaccactacggccaccccaaaggaccccgacgccaacagacagtcaaacgctgatgttgcgggcagaaaacataaaagaggtgacaattgtatactttctaggacaagcacggcttctcctttcggttcccatggacccggcaccccacctgcatgacgatttatttgtatctgggaaaatattctctctagttaaaaatgatttaaagagtcgactatacaaaaatcaatcaccaccacgaggacaagagggcaaaagcaaaacagacaaaaagaaaaaaaatcgccgtctccgttccgaatttgttaaaaaaaaaaaaaaaaaaaaaaaaaaggacagggggaaaaaaaaaaaaaaagaactcctggagagggaaatagcaaatgtgtcttgccttttgttgctctctctctctttttttttctctcgctctctttctttctcttcttctctctgtttttaagtcaagtattggtcaaaaaaatgcaatcttctgttttttgttcagcagacaatcattttcttcgtaagcacctttttctctccactctgtcactgcctgtgtgggtactggttataaatgtggaaaaagaatagttatgactgtaacagatttttatttttatttcaaaattttatatgaattatgtatatcttaatgatcggtcattttcccagtttgtaatatatgtgtagaaattgcctgtatatgatattgctttttctcctctccctttctctttctctcctctccctctctctgtctttctccccgctcaactgtctcttttctttttggggttctcctcccactcggtgctcctggtgtcgacttggcagtcaaggagaggcatggtggcctgggttaggaagagggaccctgtcgctagcaaaagcggagagtgagattgtagtattcttatgcaaaagctatttccagtatttcttagcagcttcagaggtatctctcactccctgtagggcgcttttactgttatcttaaactgcgtgtttatctatatgtaaaaactttctaaagcaaatacagtattctccattttcttatcactcccaaaaaaaaaaa

SEQ ID NO: 910 - DNA, 6217 bp, Homo sapiens
atgtcctcttcctcccccaccgggcagatcgcaagtgcggcggacatcaagcaagagaatgggatggaaagcgcctcggaagggcaggaggcgcaccgagaagtggcggggggcgcggcggtagggctgagccccccggctccagccccttttcccctggagccgggggacgccgcgaccgctgccgccagggtgagcggagaggaaggggcagtggcggcggcggcggccggagcggcggcggatcaggtacaactccactcggaacttctgggcaggcaccaccacgccgccgccgccgccgcgcagaccccgctggccttctcgcccgaccacgtcgcctgcgtgtgcgaggcactgcagcaggggggcaacctggaccgcctggcccggttcctgtggtccctgccccagagcgacctgctacgtggcaacgagagcctgctgaaggcgcgggcgctcgtggccttccaccagggcatctaccccgagctctacagcatcctcgagagccacagcttcgagtcggccaaccacccgctgctgcagcagctctggtacaaggcgcgctacaccgaggccgagcgagcccgcggccggccgctgggagccgtagacaagtaccggctgcgcaggaaattccccctgccccgcaccatctgggacggcgaggagacggtgtattgtttcaaggagaagtcgcgcaacgcgctcaaggagctctacaagcagaatcgctacccttcgcccgccgagaagcggcacctggccaagatcaccggcctctccctcacccaggtcagcaactggttcaagaaccgccggcagcgcgacaggaacccctccgagacccagtccaaaagtgagtcagatggcaaccccagcactgaagatgaatccagcaagggacatgaggatttatctcctcacccactctccagttcatctgatggcatcaccaacctcagcctttccagtcatatggagccagtatatatgcaacaaattggaaatgctaagatatcattaagctcttctggagttctgttgaatggaagcttggtacctgcaagtacttcacctgtcttccttaatggaaattcttttattcagggacccagtggagttatccttaatggattaaatgtgggaaatacacaggcagtggcattgaacccaccaaaaatgtcatcaaacattgtgagcaatggtatatccatgactgacatactggggtctacttcccaggacgtgaaggaattcaaagtcctccagagttctgctaactcagcaaccaccacgtcctacagccccagtgtccctgtctcattcccaggcctgatacccagcactgaggtgaaaagagaaggcattcaaacagtggcttcccaagatggagggtctgtagtgacttttactacaccagtgcaaattaaccagtatggcattgtccagatccccaattccggagcaaacagccagttccttaatgggagcattggattctctccactgcagctgccccctgtgtcagtggcagcttcacaaggtaatatctcagtaagctcaagcacttcagatggaagcacatttacaagtgagtctaccacagtccagcaaggaaaggttttcttgagctctcttgctcccagtgcagtggtatacacggttcctaatacaggccagactataggatctgtgaaacaggaaggcttggaaaggagcctggtattttctcagttgatgcctgtcaatcagaatgcacaagtaaatgcaaacctgtcttctgaaaacatctcggggagtggcctgcatccactggcctcctcattagttaatgtatctccaactcacaatttttctctcagtccctctacactactaaatcccactgagctaaaccgcgacattgccgatagccaaccaatgtctgcaccggtggcaagcaaatctactgtgacatctgtcagcaacactaactatgcaactcttcagaactgctcccttattactggtcaagacctattgtcagtccctatgactcaggctgcccttggggaaatagttcctacagctgaagatcaggtaggtcacccctccccagcagtacatcaggattttgtccaagaacatcgtttggttctgcaatcggtagctaacatgaaagagaatttcttatcaaattctgagagcaaagcaacaagtagcttaatgatgctggactctaaatccaagtatgtcttagatggcatggttgatactgtctgtgaagacctggaaacagacaaaaaagagcttgccaagctccagactgtccagctggatgaagatatgcaagacttatgaactttatttcctcctcacctctttttggcatcagcggcaaatcttttcatgaagccccaaggacacaaaacattttcccatttaaaggaaaacactctagttttgcaagtatatgcatacaagagactttagattgatctgcatgaagatcacagttaagtatacaggagtagaactgcattattgcagcctttttgttcacttataaatttctcttttaaatagatggagacaaaggacaaggtgaaatgtatcaagtcaaagtgaatcatttagttgactctataattctaaggtcaaaatggaacttgatagttttttaaattaaaaaatgtatacacctaacatagaaaattaaagatagctgcagaccattagaaataatacaattgtttttgtttacttttactccatgggcattgaaaaggttaagaaacataaatggtacatatttttaaagttaagtagcatgcatatatatatgcacacacacctctttttcagcattttttgagaaagtcttgggtctcaaacacatttgtctcaacacatttccaaatgtgatttctaatagctcagtgtggctgagaaagtgcggaactccactaaaaactctgaaacttcagtataaatgtaaatatatcagttctataagcaggatttgagtaattacagtgaattttatttttaatgtatatgtttctcttcaggcgctatgaactgaaaaatatgttttcttactgtttaatttatttttattgtttgaacaggaagtgaacatagtcgtttccaacaaagttttactttttgtaggattttaaaaataatgatttttaccaggaatctattaaggtcaatattaataacactgaaacaggaaatctaactcccaatattggaattttggtactttttttcacatccttgttctttatttagcaactctgattcatttaaatatgttttttatagaattctatgtgcctttttacctcgtggcctttttattggtagtaaggtacagaagtgtcaacagaagcactgatggttcttttctactatctaacagggttaatttcaccacaaaattgctttaaatctgaagaacttaagtttcactaaataatatatatgacatttatcacacaaatggataaacaactaattattgttgatacttttcattacaaggaaaataagttataaataccatgtcaaattgattatacaggctatgaaaaccattttaaaggaaagaaaatatgtaaattctattgagcaaaattctgtcctgttgaaacttagttctaaaggttttgaatcagttgttacactctgacacatgactgttgtttgcactatattatcatgtcttctttaaaagtaaatatttttggtttctgtaagaagcttgtttaataatgttgtaagccgtggctatagttttatcaagactctgaacacaagatgtaacaatgcaaataaatttatgtagtgagtaaagttgctctctagtctctgaaaagcaaaaaaagtgagaaaataatttcttcagagataacttcaagttgttgaacataaaggtgttagatgttagcacatcttgctttttttttttttttgagatggagtctcgctctgttgcccaggctggagtgcagtggcacgatcttggctcactgcaagctctgcctcctgggttcacgccattctcctgcctcagcctcccgagtagctgggactacaggcacctgccaccatgcccggctaaatttttgtatttttagtagagacggggtttcaccgtgttagccaggatggtcttgatctcctgacctcgtgatctgcccgcctcggcctcccaaagtgctgggattataggcatgagccactgtgcctggccacatcttgcttttttttttatgatcagaacaaagggcccactctagttctctacatgtcaatcaatcaagcatgttgaataagggacatagaggatttaacttttgttatcataaatggaacttgcaggcatatatcaagaaccctatgaagaattcctctcccatcattttgataaagaactacatcatttttgatagaattggtgaatgttcctaaactgctgaagctacatgttttttgttttgttttacaaagtcaggtgtttgagagttcttttccactctactactactcatagagcttgttttttctttgggtgtgtgctgatcctgttactgagattaattacatggctctgcagtgtagtttacataaaaatgatgttttccacttgattgctgcagatatcaagagtttgttattttcaaatacccatccaacaagagagatggggaggtttttagttatatatgctatatatatatatataactggaaatgttttatatgttttccgaaaatacaataagcctctcttttattcagtgttcttcctcttttctcccttatgaaaaagaaaagatagcacaaaacttaagacttacctaggaaacccattcatattcccaccatgatgtaattataaccctacaattacttcaggtagctacacaatataccaggtaagaatcaatgcacagtataaagaacttattgttcttttctattctttcagttgaataagggccagttggtatgcagcccatgtatatgtgaatggagtaagataaaccccatgatctccttgcacagaattgcaaatgtcttttgccataccaagggccagactcagaacccttggagtcatgtggcagaatttccctcttacataaaccaatgcttgaaaatgctgcaaatgaccctctaatgatccctgaagatcaaaacaggggtaaatgactccctgcaaaacccaacccatgctgctggctgtgggatttttggtgtaagcctatctatgcactctatcagccagaatttggcatttagctcttagttaaatctagtaaaggacagtctattgtttaaagagaaggtgcatttgttcctcaatcaagcaagagcacctgtgttgtactgctttatatctcatgtatatttatagtaatgaaaagactttttaaattgtacacgtttcagtgcctttcttgtgttatgaaaggcaggtagatattatagccataggtaaaaatccatagttaaattgcacactgaccttaaatctctctgtgtatgcccttgtatcttgcatgttaaaagttggattattgggcatgtgtggcagcctgccctgctacatgctagacaagtgtgctttagtacatagccacaagttcttcattctttaaaatgttttgacagatcatctcataataaaaataattcaggaaaactatggggaaatagttacatttcacaaaagatattttaaactctttgtaaaacttagataatagagcctagcagttactttgtatctaattgatacattttatgttaatttaccaccatacattttattaatcaaaattgtatagcatgtgactcttttggctttcagagttctcaaaaatattattttgttgcatgtactgtatgtttagaggcaaccaattatatactcaatatggttttactgtgccttacacaaagagaaactctatacagaatgtatatcatggggtggggtaacagagtctttactgcactgttaggtgatggcacacagagcatgtcccagaacatttctgtgcttaattacccaaccaaagagatctgaagtatgtatgtcgtactgtaatgggggtttatgcctggacaattaagtgttttatttgttttctgaaatgatgtgaacttatttttctaaacactatgctaaataaactttatatttatacatacaa

SEQ ID NO: 911 - DNA, 5800 bp, Homo sapiens
ggatcccgcgcccccctcctcacttgcgctgctctcggagccccagccggctccgcccgcttcggcggtttggatatttattgacctcgtcctccgactcgctgacaggctacaggacccccaacaaccccaatccacgttttggatgcactgagaccccgacattcctcggtatttattgtctgtccccacctaggacccccacccccgaccctcgcgaataaaaggccctccatctgcccaaagctctggactccacagtgtccgcggtttgcgttgtgggccggaggctccgcagcgggccaatccggaggcgtgtggaggcggccgaaggtctgggaggagctagcgggatgcgaagcggccgaatcagggttgggggaggaaaagccacggggcggggctttggcgtccggccaataggagggcgagcgggccacccggaggcaccgcccccgcccagctgtggcccagctgtgccaccgagcgtcgagaagagggggctgggctggcagcgcgcgcggccatcctccttccactgcgcctgcgcacgccacgcgcatccgctcctgggacgcaagctcgagaaaagttgctgcaaactttctagcccgttcgccgcccctcctcccggccagacccgccccccctgcggagccgggaattccgaggggcggagcgcaggccgagatggggaatgtgggggcctgcagaggaccctggagacggaggcgtgcagaagctcagtctcggggcggaggcttcgcgcccttagtcctcctggacggcccgttaccttctgcgttgtcccgatggggaaactgaggccctgagccagaagcacacgctggggggaggcagaaagcgcggccagaggcggagggaaaacaaagggagaatcacagacagacgggagggggacggacacacacaaggggacagagacccgagtggagagctggatctcgccttcccggcgtggggcgcagggtcggccagaaagaagatcgagaagagcggggagtgggggcgaaaaggggggacaggtgggggaggaggctggggaaagcccgagggaggaagagagggagggaggaacttcccaaagttgcaaaacatggctaccttgcctgcggagccgagcgcggggccggcggctgggggggaggcggtggcggcggcggcggcgaccgaagaggaggaggaggaagcgcgccagctcttgcagactttgcaggcggccgagggtgaggcggcggcggcggccggggccggggcgggcgcagcggctgcgggagctgagggcccgggatccccgggcgtccccgggtcgccccccgaggccgcttccgaaccgcccacgggcctccgcttctcgcccgagcaggtggcgtgcgtctgcgaggcgctgctccaggcgggccacgccggccgcttgagccgcttcctgggcgcactgcccccggccgagcgcctacgtggcagcgacccggtgttgcgcgcgcgggccctggtggccttccagcggggcgagtacgccgagctctaccggctactcgagagccgccccttccccgccgcccaccacgccttcctgcaggacctctacctgcgcgcgcgctaccatgaggccgagcgggcccgcggccgcgcgcttggcgcagtggacaagtatcgactgcgcaagaagttcccgctgcccaagaccatctgggacggcgaggagacagtctactgcttcaaggagcgctcccgcgcagcgctcaaggcctgctaccgcggcaaccgctaccccacgccggacgagaagcgccgcctggccacactcaccggcctgtcgctcacgcaggtcagcaactggttcaagaaccggcgacagcgcgaccggaccggggccggaggcggcgcgccctgcaagaggtgaggggcctcgggcggcgcaagtccagttctcccggggacatcccgtccaccagccctcttcccccgtgcccactgctggggccggcgcgccgaggtcctcggacatctcccgggacagctcacaatctcaggcgcccgcggggcgcggggactaagtgtggacgggacaggcacccgcccgggccctctccccgcacgcgtctcctcttccagcggctccattccgagctccttcccaaatcccatcggtgttggggaatcacactgcggggggcactagagggactgaggaaaaaggacagggcctgtggccactccactccgcgtaggggctgcctcccagccccctttcttcactgaccgttactcttacccacccgcccccacactccctccgggcccggacggcgtggtccgtcttctgcctttgttgtgaaacgtgaacctttcccagctccggtttccctgtaacccaaacccttctcctcccaccctgagcgccggcctctcccttctctgacgccccgcggggagggcaccgggaactgggctggcggctgctgctccctctctccaggccactcgcccgctttccgcccaaccaaggaacttttagggcaacctgggagctcagcctctggggacccgaggccgaggtgggggagagcaagggcctcttccctccccagcgcttctctgcagtggtgtccacgcagggcttgcaaaaggccctggagtttggagtggtctcagagaggcgtcataacccctggaatgatccaccgaaacttgggccagggaaaggtgggggagcagctggctggctatgcgggaggccccacaggctaagggaccccagctgacagccatttctccggccagcgagtctgatgggaatcccacgactgaggacgagtccagccgaagtcctgaggacctggagagaggggcggccccagtgtccgccgaggccgctgcccagggctccatattcctggcagggaccggccctcccgcgccttgcccggcttcctcctccatcctggtgaacgggagcttcctggcagccagcggctccccagcagtgctcctcaacgggggccccgtcatcatcaacggcctggccctgggcgaggcctccagcctgggcccgctgctgctcactgggggcgggggtgcccctccaccgcagcccagccctcagggggccagcgagaccaagacctctctggtcctggaccctcagacaggggaggtgcggctggaggaggctcagtcggaggcccctgagaccaaaggggcccaggtggctgctccgggaccagcccttggagaggaggtcctggggcccctggcccaagtggtgcctggccccccgacggctgccacctttcctctgcccccggggccagtgcctgctgtggctgccccacaagtggtaccgctctccccacccccggggtatcccacgggcctgagccccacctccccactattgaacctgccccaggtagtacccacctcacaggtggtgaccctgccccaggctgtggggcccctgcagctgttggcagccgggccaggcagccctgtgaaggtggcagctgcagcaggccctgccaatgtgcacctcatcaactccggggtgggcgtgactgccctgcagctgccttcggccactgccccaggtacccccatctccctccctcaggcctaggtgagagccggggaggggtgcagtcatctcggagagggaggggctgtccctgggctcctggagggcatctcatccctggcaagtcccagtgccccaaggcccaccacaaggctccctccgcccgccctccagctgcacagtctccacttctctctggcttggcctgctctcctggctctcacctgcgctcggtccctctctccccacaggaaacttcctcctggccaaccctgtgtctggcagccccatcgtgacgggtgtggccctgcagcagggcaagatcatcctcaccgccaccttccccaccagcatgctcgtctcccaggtcctgccgccagcccccggcctggccctgccactgaagccagagacggccatctccgtgcctgagggaggcctcccggtggcccccagccctgctctcccagaggctcacgccctaggcaccctttctgcacagcagccaccccccgccgctgccaccacctccagcaccagcctgcccttctcccctgactcccctggcctcctgcccaacttcccggcgcccccaccagaggggctgatgttgtcacccgcggccgtgcctgtctggtcagcagggctggaactaagcgcaggaacagaggggctgctggaagcggaaaaggggctggggacacaggccccccacaccgtgctgaggctgccagaccccgaccctgaggggctgctcctgggggccaccgcagggggtgaggttgacgaggggttggaagctgaggccaaggttctgacccagctccagtcggtgcctgtggaggagcccttggaactgtgaccagtgtggccccgtggcctctcccgacattggtgctgaagacgcagggacaggaatgggaggggggagccccagaaatgcggttgctgaagaccccagtcaccacatccttctgctctgggtggcctctccaagccctggtggtgctgggggttgtatccccggccacctcctgtccaggtctccatccccctttggatgggaggcctctctgttacagccctccccatgctgtgccctgccatatacgtgggggactcagggtcctgactcaggggccctgccccctccacttggtactagctgtaagcggaacaccctgccccagggccggacttccagcccccagagccctctccctgtcactccctgaaacactattaatagctctgccgatagctggtgttgtcacaactgcctggaatccgaaggtggaggacaggcagccccgcgcccctgagactggagaccctccccagtgtggcatttcctgccaggggcggggggtggggcagctgtggggagacgggggtcttccttcaccagctcccctcgactcaagcccttgtcctcattatccggcccagaccaaagattccctcatccctgggggcagccctgccgctgtgtctcctttgtatcctaaatctttatttttctaggacatgttatgcctccattttcaattaaaataaagttatcggattacaccaccaccaggggtctggggtgccttccagtgtctgtccaaagcagcgctgaacacagagcccacctcgagacctggccttcccattgctgcctcccgaggggaagaggggtttgcattcagatgcacagagtggctggggagggggtggcactgaggcctcttgcaagccacaggcctccagatgagggtggacggagcaccccagtggggcagcagggggacgcaggagggcctgcccttgtctctcttgctggtaacaaaggttccacttgctttattttatttaaaacaataaatagtctaaaaatagaacaggagagggaggagtagggtgaggtgagcatgaacagggttgcaaccgagtggctctggggtggggaagggaaggggagaggggtgggtaaacttcaccttccgacaccccgcatttcattttgggtttccttcctaagcctgggggagaatcaaggcagctgtgggtgactctggtgctccaggcaaatgtgcccagcggttggggctaatcagtgcccccctccccagtcccatgggacctgcattctcaggggctggaggcccaggagggacaagttcatcgatgggtcctggcttccagcaagagccgcgg

SEQ ID NO: 912 - DNA, 1500 bp, Homo sapiens
ctcctccagtcggggtcgtccgctcccggccgttgagccaccgccgccacccggtagtgtgtcccgctgccccaatccgcctcatcaacaagcgcctggcacactcagccaggcccgcgggcatctgctgcgtgtcccgctccgggctcagtgccctcgccgccgccggcactgcctcgatgttccagctgcccatcttgaatttcagcccccagcaagtggccggggtatgtgagaccctggaagagagcggcgatgtggagcgcctgggtcgcttcctctggtcgctgcccgtggcccctgcggcctgcgaggccctcaacaagaatgagtcggtgctacgcgcacgagccatcgtggcctttcacggtggcaactaccgcgagctctatcatatcctggaaaaccacaagttcaccaaggagtcgcacgccaagctgcaggcgctgtggcttgaagcacactaccaggaggctgagaagctgcgtggaagacccctgggacctgtggacaagtaccgagtaaggaagaagttcccgctgccgcgcaccatttgggacggcgaacagaagacacactgcttcaaggagcgcacgcggcacctgctacgcgagtggtacctgcaggatccataccctaaccccagcaaaaaacgtgagctcgcccaggcaaccggactgacccctacgcaggtgggcaactggttcaaaaaccgccgacaaagggaccgagcggctgcagccaagaacagactccagcagcaggtcctgtcacagggttccgggcgggcactacgggcggagggcgacggcacgccagaggtgctgggcgtcgccaccagcccggccgccagtctatccagcaaggcggccacttcagccatctccatcacgtccagcgacagcgagtgcgacatctgagttgcccatccaggatgctcagaagcagattccagtgtaaaaacgagaaaaacaaaatgaaagaggggaagaagatgagagacctgcaaatccagcgccacagaagccaggtgaccagggacccgcgggctcgggttgccgtttcccgccccaccccgcggccggcctggcttcactggcgccctttggccgcgaccacgggaaccagcggtgaggcctgacccagcaccacgttcttcttgctttgctttttcctaaggattttgctgcaaagtctccttcggaacccgaactgcaagctgagcgcctgcccagattctcccatgggtatttcacgtcgaaaggacgctgttacatatgtataactttcgctttaaagtttttttttaacaaaacatatatatgctgtttatttacttatttaagagaccgccatggtaggtttctctgtagcttggggaacttgctgtttctaaacatgcaggctggtggtgatgggttctgtgtggagaagccaaacaataaaacaacctagtgggcaaccttcttaattaaaaaaaaaaaaaaaaaaaaaaaaaaa

SEQ ID NO: 913 - DNA, 5084 bp, Homo sapiens
gagaagattggggtgacaagaaagtcatctgcaacaagttcatccagacgagtgctgtcacttgtctgcaatggccggcagaatacatcattgtctttggactggctgaagggaaggttcgtttagcaaacaccaaaactaataaatcatctaccatctatgggacagagtcttacgtggtgtccctgacaacaaattgctctgggaaaggaattctctctggtcatgcagatggtaccatcgttaggtatttctttgatgatgaaggctctggagagtcacaggggaagttggttaaccacccgtgtccaccctatgccttggcatgggcaaccaatagcatcgtggctgcaggctgtgatcggaaaattgtagcctatggaaaagaaggtcacatgctacaaacttttgattatagccgtgaccctcaggagcgggagttcaccacagctgtatcaagtcctgggggccagtctgttgtgctaggaagttatgacaggcttcgggtgttcaactggatccctcgaagaagcatctgggaagaggcaaagcccaaggagattaccaatttatacaccatcactgccttggcctggaagcgggatggctcacggctctgtgtgggcacactatgtggtggggtggaacagtttgactgctgcctccgaaggagtatttacaagaacaagtttgagttgacgtatgtgggacctagccaggtgattgtgaagaacctgtcatcaggaacccgagtggtgctcaagtcacactatggctatgaggtggaagaggtgaaaatcctaggaaaggaacgttacttggtggctcacacatcagaaacactgctgctgggggacctgaacactaatcggcttagtgagatagcctggcaaggatctggtggcaatgagaagtatttctttgaaaatgagaatgtatgcatgatcttcaatgccggagagctaaccctggtggaatatgggaataatgacaccctgggttctgtacgcactgaattcatgaacccccacctcatcagtgttcgtattaatgagaggtgtcagcgaggaacagaagataataagaaattggcttatcttattgatattaagactattgctatagtggatctgattggtggctacaacattggcaccgtcagccatgagagccgtgtggattggctggaacttaatgagactggacacaagctcctcttcagggaccggaaacttcgtttgcatctgtatgatattgaaagctgctctaagacaatgatcctcaacttctgctcctatatgcagtgggtcccaggaagtgacgtgctggtagctcagaaccgaaacagtctgtgtgtatggtacaacattgaggcacctgagagagtcaccatgttcactattaggggtgatgttataggtctggagcggggcgggggaaagaccgaggtgatggtgatggaaggtgtgactactgttgcctacacattggatgagggcctcatcgagtttggaacagccattgatgatggcaactacatccgggcaacagccttcttagagactctggaaatgaccccagaaacagaggcaatgtggaaaaccttgagtaaactggcactagaggcaaggcaactacacattgcggagaggtgcttttctgctttgggccaagtagcaaaagctcgattcctgcatgagaccaatgagattgcagatcaagtatcccgggaatatggcggagaaggaacagacttttatcaggtccgagcacgtctagccatgctggaaaagaactacaaactggctgaaatgatctttttggaacagaatgctgtggaggaggccatgggcatgtaccaggagctacaccgttgggatgagtgtatcgctgtggctgaagccaaggggcacccagccctggagaagctacgtcgtagttactaccagtggctgatggacacacagcaagaggagcgagcaggtgaactacaggagagccaaggggatgggctagcagccatcagcctctacctcaaagctgggctccctgccaaagctgctcggctggtgctgacccgagaggaactgctagccaacacagagctggtagaacacatcactgcagcccttatcaagggggaactctacgaaagggcaggtgatctctttgagaagattcacaatccacagaaggccctggagtgctaccgtaaaggcaacgcattcatgaaagcggtagagctggctcgattggccttcccagtggaggtggtgaaactagaggaggcatggggggaccacctggtgcagcagaagcagcttgatgcagccattaatcactacatcgaagccaggtgctccattaaggcaattgaggccgccctgggtgcccgccagtggaagaaggcaatttatatattagatctacaggaccggaacactgcatccaaatactatcctctcgtggcccaacactatgcatccctgcaggagtatgagattgctgaggagctctatactaagggagatcggacaaaagatgccatagacatgtacacccaggctggtcgttgggaacaagcccacaagctggcgatgaaatgcatgagaccagaagatgtgtcagtgctatacatcactcaggcccaggaaatggagaagcagggcaagtaccgtgaggctgaaaggctatatgtgacagtacaagagcctgatcttgccatcaccatgtacaaaaagcacaagttgtatgatgacatgatccgcctggtagggaagcaccatccagatctcctcagtgatacacacctacatctgggcaaggagctggaggctgaaggccgactacaggaggctgagtaccactacctcgaggcccaggaatggaaggcaacagtgaacatgtaccgggccagtgggctttgggaagaggcctacagggtggccagaactcaaggaggggctaatgcccacaaacacgtggcctatctgtgggcaaagagcctgggaggagaggctgcagttagactgcttaataagctgggactcctggaagctgctgttgaccacgctgcagacaattgctcctttgaatttgcgtttgaactctctcggctggccctcaagcacaaaacccccgaggttcatctcaaatatgctatgttcctggaggatgagggtaaattcgaagaggctgaagctgaattcatcagagctggtaaacccaaggaggcagtcctcatgtttgtccataaccaggattgggaggcagctcagcgtgtggctgaggctcacgaccctgacagtgtcgccgaggtgcttgtgggacaggcccggggggccttggaggagaaggactttcagaaagcagaagggctgctgctccgggcccagagaccaggcctggccctcaattattataaggaggctggattatggagtgacgctctgcgcatctgcaaggactatgtgcccagccagctggaggctctgcaggaagaatatgagcgggaagctactaagaagggggccaggggtgtggagggatttgtggaacaagctcgacactgggagcaggctggagagtacagccgtgccgtggactgctacctcaaagtgcgagactctggaaacagcggcctggcggagaagtgctggatgaaggcagctgaactctccatcaagtttctgcctccccaacgtaatatggaagtcgttctggctgtaggaccccagctgattggaattggaaagcacagtgcagctgcagagctctatctgaatctggaccttgtcaaggaagcaatcgatgctttcatcgagggtgaggagtggaacaaggcgaagcgtgtagctaaggagttagatcccaggtatgaagactatgtggaccagcattataaagagttcctcaagaatcagggcaaagtggactcgctggtgggtgtggatgtgatagctgctttggacctgtatgtggagcagggccagtgggacaagtgcattgaaacagctaccaagcagaactacaagattctgcacaagtatgtggctttgtatgcaactcacttgatccgggagggtagctctgcccaggcattggccctgtatgtacagcacggagcccctgctaacccacagaacttcaatatctacaaaaggatcttcactgacatggtgagctctcctggaaccaactgtgccgaggcctatcatagctgggctgatcttcgagatgtcctcttcaacctgtgtgaaaacctggtgaagtccagtgaggcaaactctccagcccatgaggagttcaagacgatgctgctgatcgctcattactatgccacgcgctctgcagcccagagtgtcaaacagctggaaaccgtggctgccaggctttctgtttcactcttgcgtcacacccagctactacctgtagacaaagccttctatgaagcaggcattgctgccaaggcagttggctgggataacatggcattcatcttcctcaatcgctttttggacctgaccgatgcaatcgaggaagggactctagatggccttgaccactctgattttcaggatacagacattccctttgaggtgccactcccagctaagcagcatgtaccggaggctgagagagaagaggttcgagactgggtgcttacagtctccatggaccagcggctggagcaggttctgcctcgggatgagcgtggcgcctacgaggcctccctagtggcagcgagcactggtgttcgagccctgccctgccttattacaggataccccattctgaggaacaaaattgaatttaagcggccagggaaggctgctaacaaggacaactggaataaattccttatggccatcaagacctcccacagcccagtgtgccaggacgtgctgaaattcatcagtcagtggtgtggagggctccccagcaccagcttttcctttcagtagttggtagagctgaggaagagttagggcctctccctcattaaagttttataaataaaaaaaaaaaaaaaaaaaaaaaaaaaaaaaaaaaaaaaaaaaaaaaaaaaaaaaaaaaaaaaaaaa

SEQ ID NO: 914 - DNA, 2296 bp, Homo sapiens
cgcgtcctgagagtcagccctcgccgctgcagcctcggcgcccggccggccggccatggagcgccccccgccccgcgccgccggccgggaccccagtgcgctgcgggccgaggcgccgtggctgcgcgcggagggtccggggccgcgcgccgcgcccgtgacggtgcccacgccgccgcagggctcttccgtgggcggcggcttcgcgggcttggagttcgcgcggccgcaggagtcggagccgcgggcctcggacctgggggccccccggacgtggacgggggcggcggcggggccccggactccgtcggcgcacatccccgtcccagcgcagagagccaccccaggaaaagcccggctggacgaggtcatggctgccgctgcccttacaagcctgtccaccagccctctccttctgggggccccggttgcagccttcagcccagagcctggcctggagccctggaaggaggccctggtgcggcccccaggcagctacagcagcagcagcaacagtggagactggggatgggacctggccagtgaccagtcctctccgtccaccccgtcacccccactgccccccgaggcagcccactttctgtttggggagcccaccctgagaaaaaggaagagcccggcccaggtcatgttccagtgtctgtggaagagctgcgggaaggtgctgagcacggcgtcggcgatgcagagacacatccgcctggtgcacctggggaggcaggcagagcctgagcagagtgatggtgaggaggacttctactacacagagctggatgttggtgtggacacgctgaccgacgggctgtccagcctgactccagtgtcccccacggcctccatgccgcctgccttcccccgcctggagctgccagagctgctggagcccccagccctgcctagtcccctgcggccgcctgccccgcccctgcccccgccccctgtcctgagcaccgttgctaacccccagtcctgtcacagtgaccgtgtctaccagggctgcctgacgcccgcccgcctggagccgcagcccacggaggtcggagcctgcccacccgccttgtcctccaggatcggagtcaccctgaggaagccccgcggcgacgcgaagaagtgccggaaggtgtatggcatggagcgccgggacctctggtgcacagcctgccgctggaagaaagcctgccagcggttcctggactaagtccggctcgttcaagaacataagctaccaccttctccctccccaccccctccaggcccggggctgaaacagcccgaggacagccccaggggctggctttcaccagctgcagggtctgcttttacttggggtgggggggcggggctgaccctgaaccctcccccccgccaggtcggggaggggtcccaccactcaaagtgcctctaaagaaaccagctttttgcactaaagccaaaccacaccgctgtccccttagccccaagggccctgggggcagccaccctcccgcctgtcggcccgtagatttatcaagggtgttatgggcccagctttggggggccagtcccgatgcactttgaggggtgttggagaggggactcccccactcgcacttaactcaacggctctcgggccctggggctgtttttaccatgtttgtttttgaagctcaggtgtctcacgtctgggctgcaccaggcgaagagagaaattaaagatttgaggtttttccagaagctttgtctgcctctcgggaggaaggccgtggggctgggaccctgtggtgggcaagtgggtggagtctggcagctgcccacagagggccgagggtcacccgtcggccgccgccaccccaggcgaggccggaggaaggatcatctgagacgcaggaggcatctgctggagcagcaatttcccaatttattgaaagtgatcgctttgcaaggatgtctaagctaatcccgtcacagaaaggaaacgcacaggcgcctaggcagaaacttggagactcaccgcagaggccacgtgaacccacggccacagagaggcaggacggcagagccatgatttcccaccgagcgattacgagaacctcttcccccaatagtagacacatctccaatacaaacacaggtttataataagtaataggaagtcaatataatatagattatccccagaaaaaaatcaacaatcttcaaacactgccctttttttgtgtgttttgtttttgttgacaggttgaaagcatgttgaaaaaaataaatatttaagaaaagcaaaaaaaaaaaaaaaaaa

SEQ ID NO: 915 - DNA, 4102 bp, Homo sapiens
gcggagtgattccccacccctgctccatctagctctttccagtgcagccactgccgccgcccaggagccctcgtcccctgccttgtccccctactcgttcccgctcccacggcatggagcaggacactgccgcagtggcagccaccgtggcagccgcggatgcgaccgccactatcgtggtcatagaggacgagcagcccgggccgtccacctctcaggaggagggagcggccgccgcggccaccgaagccaccgcggccacggagaagggcgagaagaagaaggagaaaaacgtttcttcatttcaactcaaacttgctgctaaagcgcctaaatctgaaaaggaaatggacccagaatatgaagagaaaatgaaagccgaccgagcaaagagatttgaatttttactgaagcagacagaactttttgcacatttcattcagccttcagcacagaaatctccaacatctccactgaacatgaaattgggacgtccccgaataaagaaagatgaaaagcagagcttaatttctgctggagactaccgccataggcgcacagagcaagaagaagatgaagagctactgtctgagagtcggaaaacatctaatgtgtgtattagatttgaggtgtcaccttcatatgtgaaaggggggccactgagagattatcagattcgaggactgaattggttgatctctttatatgaaaatggagtcaatggcattttggctgatgaaatgggccttgggaaaactttacaaacaattgctttgcttggttacctgaaacactaccgaaatattcctggacctcacatggttttagttccaaagtctactttacacaactggatgaatgaatttaaacgatgggtcccatctctccgtgtcatttgttttgtcggagacaaggatgccagagctgcttttattcgtgatgaaatgatgccaggagagtgggatgtttgcgttacttcttatgagatggtaattaaagaaaaatctgtattcaaaaagtttcactggcgatacctggtcattgatgaagctcacagaataaagaatgaaaaatctaagctttcagagattgttcgtgagttcaagtcgactaaccgcttgctcctaactggaacacctttgcagaataacctgcatgaactgtgggccttactcaactttttattgcctgatgtctttaattctgcagatgactttgattcttggtttgacactaaaaattgtcttggtgatcaaaaactcgtggaaagacttcatgcagttttaaaaccatttttgttacgccgtataaaaactgatgtagagaagagtctgccacctaaaaaggaaataaagatttacttggggctgagtaagatgcaacgagaatggtatacaaaaatcctgatgaaagatattgatgttttaaactcttctggcaagatggacaagatgcgactcttaaacattctgatgcagcttcgaaagtgttgtaatcatccatatctgtttgatggtgctgaacctggtccaccttataccactgatgagcatattgtcagcaacagtggtaaaatggtagttctggataaactattggccaaactcaaagaacagggttcaagggttctcattttcagccagatgactcgcttgctggatattttggaagattattgcatgtggcgtggttatgagtattgtcgactggatggacaaaccccgcatgaagaaagagaggataaattcctagaagtggaatttctgggtcaaagggaagcaatagaggcttttaatgctcctaatagtagcaaattcatctttatgctaagtaccagggctggaggtctcggaattaacctggcaagtgctgatgtggttatactatatgattcagactggaacccacaggttgatctacaagctatggatcgagcacatcgtattggtcagaagaaaccagtacgtgtattccgtctcatcactgacaacactgttgaagagaggattgtagaaagagctgagataaaactgagactcgattcaattgttatacaacaaggaagactcattgaccaacagtctaacaagctggcaaaagaggaaatgttacaaatgatacggcatggagccacccatgtttttgcttctaaagagagtgagttgacagatgaagacattacaactattctggaaagaggggaaaagaagactgcagagatgaatgaacgcctgcaaaaaatgggagagtcttctctaagaaattttagaatggacattgaacaaagtttatacaaatttgagggagaagattatagagaaaaacagaagcttggcatggtggaatggattgaacctcctaaacgagaacgcaaagcaaactacgcagtggatgcctactttagagaggctttgcgtgtcagcgagccaaagattccaaaggctccacggcctccaaaacagccaaatgttcaggattttcaatttttcccaccacgcttatttgagctcctggaaaaggaaattctttattatcggaagacaataggctataaggttccaaggaatcctgatatcccaaatccagctctggctcaaagagaagagcaaaaaaagattgatggagctgaacctcttacaccagaagagactgaagaaaaggaaaaacttctcacacaaggtttcacaaactggactaaacgagattttaaccagtttattaaagctaatgagaaatatggaagagatgacattgataacatagctcgagaggtagagggcaaatcccctgaggaggtcatggagtattcagctgtattttgggaacgttgcaatgaattacaggacattgagaaaattatggctcaaattgaacgtggagaagcaagaattcaacgaaggatcagtatcaagaaagccctggatgccaaaattgcaagatacaaggctccatttcatcagttgcgcattcagtatggaaccagcaaaggaaagaactatactgaggaagaagatagattcttgatttgtatgttacacaaaatgggctttgatagagaaaatgtatatgaagaattaagacagtgtgtacgaaatgctccccagtttagatttgactggtttatcaagtctaggactgccatggaattccagagacgctgtaacactctgatttcattgattgagaaagaaaatatggaaattgaggaaagagagagagcagaaaagaagaaacgggcaactaaaactccaatggtaaaattttcagcattttcctaacttttagatttaacattgttgggccatttaaaatgtgcatattggagcagaacattaaatctgtttccattttagtcacagaaaagaaaagcagagtcagctactgagagctctggaaagaaggatgtcaagaaggtgaaatcctaaagcctagaaataaagttttaaatgggaaactgctattttcttgttcccatcttcaaatgctaattgccagttccagtgtattcatggtactctaagaaaaatctctttggttttgatttcttgcatattttatatattttacaatgctttctacctgaaatgtgtagctttatattttatggcattctagtatttttgtgtactgtattttgtgcatttcatgtcttcatcaaaatcctctcagtccttgttcttttgaagcttgtgctgaggttttagcttttctatgttttatatgccgctgctttgaaagagaacctagattctatagttgtattattgttgtttcatactttaaatttatatggctgtggaaaaacgaattaaaatgttttgaggagaaagactttttcacttctttgttgctttcttttctattgagtctgggcttgtttgtgttactgcatactgtgattagcataataattgtttctttgaggtcatctaaatatttttttcctaaaggaataaagggtgaggaaagaaaaatattaaaaaagctaatatttgatactgtgcttgctgtcagtatgcattacatttaaattattctctattcaagtgggaaaatataataaagaaatgtctataagaaatttaaaaaaaaaaaaaaaaaa

SEQ ID NO: 916 - DNA, 5758 bp, Homo sapiens
tttctgtactctgggtgactcagagagggaagagattcagccagcacactcctcgcgagcaagcattactctactgactggcagagacaggagaggtagatgtccacgcccacagaccctggtgcgatgccccacccagggccttcgccggggcctgggccttcccctgggccaattcttgggcctagtccaggaccaggaccatccccaggttccgtccacagcatgatggggccaagtcctggacctccaagtgtctcccatcctatgccgacgatggggtccacagacttcccacaggaaggcatgcatcaaatgcataagcccatcgatggtatacatgacaaggggattgtagaagacatccattgtggatccatgaagggcactggtatgcgaccacctcacccaggcatgggccctccccagagtccaatggatcaacacagccaaggttatatgtcaccacacccatctccattaggagccccagagcacgtctccagccctatgtctggaggaggcccaactccacctcagatgccaccaagccagccgggggccctcatcccaggtgatccgcaggccatgagccagcccaacagaggtccctcacctttcagtcctgtccagctgcatcagcttcgagctcagattttagcttataaaatgctggcccgaggccagcccctccccgaaacgctgcagcttgcagtccaggggaaaaggacgttgcctggcttgcagcaacaacagcagcagcaacagcagcagcagcagcagcagcagcagcagcagcagcagcaacagcagccgcagcagcagccgccgcaaccacagacgcagcaacaacagcagccggcccttgttaactacaacagaccatctggcccggggccggagctgagcggcccgagcaccccgcagaagctgccggtgcccgcgcccggcggccggccctcgcccgcgccccccgcagccgcgcagccgcccgcggccgcagtgcccgggccctcagtgccgcagccggccccggggcagccctcgcccgtcctccagctgcagcagaagcagagccgcatcagccccatccagaaaccgcaaggcctggaccccgtggaaattctgcaagagcgggaatacagacttcaggcccgcatagctcataggatacaagaactggaaaatctgcctggctctttgccaccagatttaagaaccaaagcaaccgtggaactaaaagcacttcggttactcaatttccagcgtcagctgagacaggaggtggtggcctgcatgcgcagggacacgaccctggagacggctctcaactccaaagcatacaaacggagcaagcgccagactctgagagaagctcgcatgaccgagaagctggagaagcagcagaagattgagcaggagaggaaacgccgtcagaaacaccaggaatacctgaacagtattttgcaacatgcaaaagattttaaggaatatcatcggtctgtggccggaaagatccagaagctctccaaagcagtggcaacttggcatgccaacactgaaagagagcagaagaaggagacagagcggattgaaaaggagagaatgcggcgactgatggctgaagatgaggagggttatagaaaactgattgatcaaaagaaagacaggcgtttagcttaccttttgcagcagaccgatgagtatgtagccaatctgaccaatctggtttgggagcacaagcaagcccaggcagccaaagagaagaagaagaggaggaggaggaagaagaaggctgaggagaatgcagagggtggggagtctgccctgggaccggatggagagcccatagatgagagcagccagatgagtgacctccctgtcaaagtgactcacacagaaaccggcaaggttctgttcggaccagaagcacccaaagcaagtcagctggacgcctggctggaaatgaatcctggttatgaagttgcccctagatctgacagtgaagagagtgattctgattatgaggaagaggatgaggaagaagagtccagtaggcaggaaaccgaagagaaaatactcctggatccaaatagcgaagaagtttctgagaaggatgctaagcagatcattgagacagctaagcaagacgtggatgatgaatacagcatgcagtacagtgccaggggctcccagtcctactacaccgtggctcatgccatctcggagagggtggagaaacagtctgccctcctaattaatgggaccctaaagcattaccagctccagggcctggaatggatggtttccctgtataataacaacttgaacggaatcttagccgatgaaatggggcttggaaagaccatacagaccattgcactcatcacttatctgatggagcacaaaagactcaatggcccctatctcatcattgttcccctttcgactctatctaactggacatatgaatttgacaaatgggctccttctgtggtgaagatttcttacaagggtactcctgccatgcgtcgctcccttgtcccccagctacggagtggcaaattcaatgtcctcttgactacttatgagtatattataaaagacaagcacattcttgcaaagattcggtggaaatacatgatagtggacgaaggccaccgaatgaagaatcaccactgcaagctgactcaggtcttgaacactcactatgtggcccccagaaggatcctcttgactgggaccccgctgcagaataagctccctgaactctgggccctcctcaacttcctcctcccaacaatttttaagagctgcagcacatttgaacaatggttcaatgctccatttgccatgactggtgaaagggtggacttaaatgaagaagaaactatattgatcatcaggcgtctacataaggtgttaagaccatttttactaaggagactgaagaaagaagttgaatcccagcttcccgaaaaagtggaatatgtgatcaagtgtgacatgtcagctctgcagaagattctgtatcgccatatgcaagccaaggggatccttctcacagatggttctgagaaagataagaaggggaaaggaggtgctaagacacttatgaacactattatgcagttgagaaaaatctgcaaccacccatatatgtttcagcacattgaggaatcctttgctgaacacctaggctattcaaatggggtcatcaatggggctgaactgtatcgggcctcagggaagtttgagctgcttgatcgtattctgccaaaattgagagcgactaatcaccgagtgctgcttttctgccagatgacatctctcatgaccatcatggaggattattttgcttttcggaacttcctttacctacgccttgatggcaccaccaagtctgaagatcgtgctgctttgctgaagaaattcaatgaacctggatcccagtatttcattttcttgctgagcacaagagctggtggcctgggcttaaatcttcaggcagctgatacagtggtcatctttgacagcgactggaatcctcatcaggatctgcaggcccaagaccgagctcaccgcatcgggcagcagaacgaggtccgggtactgaggctctgtaccgtgaacagcgtggaggaaaagatcctcgcggccgcaaaatacaagctgaacgtggatcagaaagtgatccaggcgggcatgtttgaccaaaagtcttcaagccacgagcggagggcattcctgcaggccatcttggagcatgaggaggaaaatgaggaagaagatgaagtaccggacgatgagactctgaaccaaatgattgctcgacgagaagaagaatttgacctttttatgcggatggacatggaccggcggagggaagatgcccggaacccgaaacggaagccccgtttaatggaggaggatgagctgccctcctggatcattaaggatgacgctgaagtagaaaggctcacctgtgaagaagaggaggagaaaatatttgggagggggtcccgccagcgccgtgacgtggactacagtgacgccctcacggagaagcagtggctaagggccatcgaagacggcaatttggaggaaatggaagaggaagtacggcttaagaagcgaaaaagacgaagaaatgtggataaagatcctgcaaaagaagatgtggaaaaagctaagaagagaagaggccgccctcccgctgagaaactgtcaccaaatccccccaaactgacaaagcagatgaacgctatcatcgatactgtgataaactacaaagataggtgtaacgtggagaaggtgcccagtaattctcagttggaaatagaaggaaacagttcagggcgacagctcagtgaagtcttcattcagttaccttcaaggaaagaattaccagaatactatgaattaattaggaagccagtggatttcaaaaaaataaaggaaaggattcgtaatcataagtaccggagcctaggcgacctggagaaggatgtcatgcttctctgtcacaacgctcagacgttcaacctggagggatcccagatctatgaagactccatcgtcttacagtcagtgtttaagagtgcccggcagaaaattgccaaagaggaagagagtgaggatgaaagcaatgaagaggaggaagaggaagatgaagaagagtcagagtccgaggcaaaatcagtcaaggtgaaaattaagctcaataaaaaagatgacaaaggccgggacaaagggaaaggcaagaaaaggccaaatcgaggaaaagccaaacctgtagtgagcgattttgacagcgatgaggagcaggatgaacgtgaacagtcagaaggaagtgggacggatgatgagtgatcagtatggacctttttccttggtagaactgaattccttcctcccctgtctcatttctacccagtgagttcatttgtcatataggcactgggttgtttctatatcatcatcgtctataaactagctttaggatagtgccagacaaacatatgatatcatggtgtaaaaaacacacacatacacaaatatttgtaacatattgtgaccaaatgggcctcaaagattcagattgaaacaaacaaaaagcttttgatggaaaatatgtgggtggatagtatatttctatgggtgggtctaatttggtaacggtttgattgtgcctggttttatcacctgttcagatgagaagatttttgtcttttgtagcactgataaccaggagaagccattaaaagccactggttattttatttttcatcaggcaattttcgaggtttttatttgttcggtattgtttttttacactgtggtacatataagcaactttaataggtgataaatgtacagtagttagatttcacctgcatatacatttttccattttatgctctatgatctgaacaaaagctttttgaattgtataagatttatgtctactgtaaacattgcttaatttttttgctcttgatttaaaaaaaagttttgttgaaagcgctattgaatattgcaatctatatagtgtattggatggcttcttttgtcaccctgatctcctatgttaccaatgtgtatcgtctccttctccctaaagtgtacttaatctttgctttctttgcacaatgtctttggttgcaagtcataagcctgaggcaaataaaattccagtaatttcgaagaatgtggtgttggtgctttcctaataaagaaataatttagcttgacaaaa

SEQ ID NO: 917 - DNA, 5351 bp, Homo sapiens
acagagcgacgctggtctcccagattgttgcagaaggagacggcgtcgacgtctgactggactcgcggcgacttacctttcagtcgtgcgctcctgatccggcgctcggaatttgtccccggcttcagggctgcggggcctggaaggaggcgtatcgaggcggctcgaaaacgatccaggggagccgaggcgctcctcttgtcatcccactcagcgccatgtcctggatgttcaagagggatccagtttggaagtacttgcagactgtccagtatggagttcatggaaattttccacgcctctcatatccaactttctttccacgttttgaattccaagatgttatccctccagatgactttctaactagtgatgaagaagtagattccgttttatttggaagtttgagaggtcatgtggttggactacgctattacacgggagtagttaataataatgaaatggttgcattacaacgagatcctaataacccttatgataagaatgcaattaaagtaaacaatgtgaatggaaatcaagttggccatttaaagaaagagcttgcaggtgctttggcctatatcatggacaacaaattggcacaaattgaaggggtagttccttttggtgcaaacaatgcttttaccatgcctctgcatatgactttttggggaaaagaagaaaatagaaaagcggtttcagatcagttgaagaaacatggatttaaattgggtcctgcaccaaaaactttaggattcaatttggaaagtggttggggctctggaagagctggaccaagctatagtatgccagtgcatgctgcagtacagatgacaactgaacagcttaaaacagaatttgacaaattgtttgaagatttaaaagaagatgataaaacccatgaaatggaaccagctgaggctattgaaacaccactgcttccacatcaaaaacaagctctagcttggatggtgtcacgggaaaatagcaaagaacttccaccattctgggaacagcgaaatgacttatactataacacaataacaaatttttctgagaaggaccgaccagaaaatgtccatggaggaattttagctgatgatatgggtttgggtaaaactcttacggccattgcagtaatccttaccaacttccatgatggcagacctcttcctattgaaagagttaaaaagaatctactgaagaaggaatataatgttaacgatgactctatgaaacttggaggaaacaataccagtgaaaaggcagatggactaagcaaagacgcatctagatgtagtgaacaacccagtatttcagatatcaaggagaagagtaagtttcgcatgtcagaattgtctagctcccgccccaaaagaagaaaaactgctgtccagtacatagaaagcagtgattcagaggaaattgaaacaagtgaattgccgcagaaaatgaaaggcaaactgaaaaatgtacagtctgaaactaaaggcagggcgaaagcaggatcttctaaggttatagaagatgtggcatttgcatgtgcattaacttcatctgttcctacaacaaaaaagaaaatgttgaaaaagggagcttgtgcagtggaggggtcaaagaaaactgatgttgaggagagaccaagaacaacactgatcatctgtccgctttctgtgttaagcaactggattgaccagtttggacaacatataaaatcagatgtacacttgaatttttatgtttattatggtcctgatcgtattagagaaccggccttactttcaaaacaggatattgttttgactacgtataatattttaactcatgactatggaactaaaggagatagtccattacatagcataaggtggctaagagtgatcctggatgaaggacatgccatacgaaatccaaatgctcagcagacaaaagctgtacttgacttagaatcagaaagaagatgggttttgacaggtactccaatccagaattctttaaaggacttgtggtctcttctttcctttttaaaacttaaaccatttattgatagagaatggtggcatagaacaatacagcgtcctgtcacaatgggagatgaaggaggacttaggcgtttacagtccctaattaaaaatattacacttagaagaacaaagacaagcaaaattaaaggaaaacctgttttggagttaccagaacgtaaagtatttattcagcacattacactttcagatgaagagagaaagatttatcagtctgtgaaaaatgaaggcagagccactattggaaggtattttaatgaagggactgtcctggcacattatgcagatgtcctgggtcttttgcttagactgcggcaaatttgttgccatacttaccttcttacaaatgcagtgtcttccaatggcccctcaggaaatgatacacctgaagaactgagaaagaagttaataaggaagatgaagttaattctgagctcaggttcagatgaggaatgtgcaatttgcctggattctttaacagttcctgtgataacacattgtgcacatgtattttgtaaaccctgtatttgccaagtcattcagaatgagcagccacatgctaaatgccctttatgcagaaatgatatacatgaagataatttattagaatgtcctccagaagaattagcacgtgacagtgagaaaaagtctgatatggaatggacatccagttcaaagattaatgcgctaatgcacgcattgactgacttaagaaagaagaatcccaacataaaaagtttggttgtttctcagtttacaacattcctgtctttaatagaaataccacttaaagcctctggatttgtgtttactcgtttggatggttccatggcccaaaagaaaagagttgaatcaattcagtgttttcaaaacactgaagcaggatctccaactataatgcttctgtccttaaaagcaggtggagttggtttgaatctgtctgcagcttctcgagtgtttttaatggatccagcctggaatcctgctgctgaagatcagtgctttgacagatgccatagacttggtcagaagcaagaagttatcatcacaaaattcattgtaaaggactctgttgaagaaaatatgctgaaaatacaaaacaaaaagagagaacttgcagcaggagcctttggaactaaaaaaccaaatgctgacgaaatgaaacaagccaaaattaatgaaatcagaacattaattgacttataatttgtgggattttagtaaggtcagtttgattggatacttaagttttagaaatgagaaaaatacagagttttagaaatgagatctagagaacacgtcttctaaaaggggcatattttatattagtgaagaggtattactgacacaatttcttctatatatgaacctatttttaatgaaacttcaaatagcaataagttccgttatatactgtggcctgaaataatttgagaaaaaaggttactttgttattcagcttttcataatatctatgctgagtattttcacgtatcttccaagtactcagctttttcgtatttcaaataaggtcagaccttttatacttttgaccaaatagttattttctatgttggacacttagttatttaccaaagcctccgatttgtgatgcagtgtttgtagtccttgtaaacaatatatacagactatacaagaattaattttattgggctttcaaaaaccatatttgcattccagaaccaaatcttaaatgagaccaaagtccaggttagcacaggtttttatttttcctacagctacattgagatatagttcacataaatgacttggagttttatgttcatgaaaaaattagggattatgttaagagtactattttttccattttagttaagtagtactacactcattgtttaaatgtaacttgctgtgtctgaggtataaatatagtctgtgggagtgagaggcaaaccagtcctacccaatttgatttgaatattttaaattatggaactgctaaatagatatttctataaatagataatttttatttatgtagctttttttggaagtaactttataaatttttataattcagaagactactatatgtgagaggcgtgatatctggatggaagttgggctggatgatctccaaagtcgtttcaactcttaaagacatcttaatcctgaatgtaaacaattgttatgtgtttagaatcagaatttgattttgaacttgagtaattcatccttacagctatctgtagaattagtcatcttttttcttttcttttttttttacttttttgttaataagcaaacttatttgctgcagaatttgggttgactcctgagcatatttaaaacaaagaagctagaaatttagcagtcagattaggtaggtggttttatttcaaagggaaactttaatccaaagaaagattaattactctaacaaacaagagaagcttcatgtttgatgatacagatttaagaatacctgagacttaagagtgttggaagtcatttgatagaaagatgagatcggagacaatgttgtgttatagggcacacattgaaggtatatgccaaatctctcaccagataagtccttttctccctgtgccgttttcttgctcaaagggaacagtgaattagccagctagaatcttcctggtccctttttgaggcagtagcaggtaaggaaagggctgattttcatcaaaaccaagacctttctgcagggatgatagtggaataataatgtgggattagcccgctagcattaggagcagttgggaagttacctggtagatcaagcattacacacaaaaaatcaagttgatcagagtatgggttctccatatagcaatacttcagtgagattaagtataaacagtttttggcaaaaaacaacacagtctactctttctgcttacaaagacaaagccttacaaactcactatgaaggtaaagggaggacagcttgcttctttgcccagacatttacaaagttgtttttaaaacacactcataagtaagtttggcaagttgtttaaaaaatgtctctttgttttgtacagttctgttagatgttgttatattttaaaagtttaatttaaaaaatttaatttgtccttcctaagaaggataaatatataaaaaagccactggaatgaaaacttcctatatgctatgctgttgtcttattattatatagaaaaataactttagaaaaatattgaagacattgtattaccacttgtgattcaaacaattttgtggttaaaactggattttaaatttaaaaatcaataaaaatttcaaatgtttattaccttc

SEQ ID NO: 918 - DNA, 5703 bp, Homo sapiens
ggagaggccgccgcggtgctgagggggaggggagccggcgagcgcgcgcgcagcgggggcgcgggtggcgcgcgtgtgtgtgaagggggggcggtggccgaggcgggcgggcgcgcgcgcgaggcttcccctcgtttggcggcggcggcggcttctttgtttcgtgaagagaagcgagacgcccattctgcccccggccccgcgcggaggggcgggggaggcgccgggaagtcgacggcgccggcggctcctgcaggaggccactgtctgcagctcccgtgaagatgtccactccagacccacccctgggcggaactcctcggccaggtccttccccgggccctggcccttcccctggagccatgctgggccctagcccgggtccctcgccgggctccgcccacagcatgatggggcccagcccagggccgccctcagcaggacaccccatccccacccaggggcctggagggtaccctcaggacaacatgcaccagatgcacaagcccatggagtccatgcatgagaagggcatgtcggacgacccgcgctacaaccagatgaaaggaatggggatgcggtcagggggccatgctgggatggggcccccgcccagccccatggaccagcactcccaaggttacccctcgcccctgggtggctctgagcatgcctctagtccagttccagccagtggcccgtcttcggggccccagatgtcttccgggccaggaggtgccccgctggatggtgctgacccccaggccttggggcagcagaaccggggcccaaccccatttaaccagaaccagctgcaccagctcagagctcagatcatggcctacaagatgctggccagggggcagcccctccccgaccacctgcagatggcggtgcagggcaagcggccgatgcccgggatgcagcagcagatgccaacgctacctccaccctcggtgtccgcaacaggacccggccctggccctggccctggccccggcccgggtcccggcccggcacctccaaattacagcaggcctcatggtatgggagggcccaacatgcctcccccaggaccctcgggcgtgccccccgggatgccaggccagcctcctggagggcctcccaagccctggcctgaaggacccatggcgaatgctgctgcccccacgagcacccctcagaagctgattcccccgcagccaacgggccgcccttcccccgcgccccctgccgtcccacccgccgcctcgcccgtgatgccaccgcagacccagtcccccgggcagccggcccagcccgcgcccatggtgccactgcaccagaagcagagccgcatcacccccatccagaagccgcggggcctcgaccctgtggagatcctgcaggagcgcgagtacaggctgcaggctcgcatcgcacaccgaattcaggaacttgaaaaccttcccgggtccctggccggggatttgcgaaccaaagcgaccattgagctcaaggccctcaggctgctgaacttccagaggcagctgcgccaggaggtggtggtgtgcatgcggagggacacagcgctggagacagccctcaatgctaaggcctacaagcgcagcaagcgccagtccctgcgcgaggcccgcatcactgagaagctggagaagcagcagaagatcgagcaggagcgcaagcgccggcagaagcaccaggaatacctcaatagcattctccagcatgccaaggatttcaaggaatatcacagatccgtcacaggcaaaatccagaagctgaccaaggcagtggccacgtaccatgccaacacggagcgggagcagaagaaagagaacgagcggatcgagaaggagcgcatgcggaggctcatggctgaagatgaggaggggtaccgcaagctcatcgaccagaagaaggacaagcgcctggcctacctcttgcagcagacagacgagtacgtggctaacctcacggagctggtgcggcagcacaaggctgcccaggtcgccaaggagaaaaagaagaaaaagaaaaagaagaaggcagaaaatgcagaaggacagacgcctgccattgggccggatggcgagcctctggacgagaccagccagatgagcgacctcccggtgaaggtgatccacgtggagagtgggaagatcctcacaggcacagatgcccccaaagccgggcagctggaggcctggctcgagatgaacccggggtatgaagtagctccgaggtctgatagtgaagaaagtggctcagaagaagaggaagaggaggaggaggaagagcagccgcaggcagcacagcctcccaccctgcccgtggaggagaagaagaagattccagatccagacagcgatgacgtctctgaggtggacgcgcggcacatcattgagaatgccaagcaagatgtcgatgatgaatatggcgtgtcccaggcccttgcacgtggcctgcagtcctactatgccgtggcccatgctgtcactgagagagtggacaagcagtcagcgcttatggtcaatggtgtcctcaaacagtaccagatcaaaggtttggagtggctggtgtccctgtacaacaacaacctgaacggcatcctggccgacgagatgggcctggggaagaccatccagaccatcgcgctcatcacgtacctcatggagcacaaacgcatcaatgggcccttcctcatcatcgtgcctctctcaacgctgtccaactgggcgtacgagtttgacaagtgggccccctccgtggtgaaggtgtcttacaagggatccccagcagcaagacgggcctttgtcccccagctccggagtgggaagttcaacgtcttgctgacgacgtacgagtacatcatcaaagacaagcacatcctcgccaagatccgttggaagtacatgattgtggacgaaggtcaccgcatgaagaaccaccactgcaagctgacgcaggtgctcaacacgcactatgtggcaccccgccgcctgctgctgacgggcacaccgctgcagaacaagcttcccgagctctgggcgctgctcaacttcctgctgcccaccatcttcaagagctgcagcaccttcgagcagtggtttaacgcaccctttgccatgaccggggaaaaggtggacctgaatgaggaggaaaccattctcatcatccggcgtctccacaaagtgctgcggcccttcttgctccgacgactcaagaaggaagtcgaggcccagttgcccgaaaaggtggagtacgtcatcaagtgcgacatgtctgcgctgcagcgagtgctctaccgccacatgcaggccaagggcgtgctgctgactgatggctccgagaaggacaagaagggcaaaggcggcaccaagaccctgatgaacaccatcatgcagctgcggaagatctgcaaccacccctacatgttccagcacatcgaggagtccttttccgagcacttggggttcactggcggcattgtccaagggctggacctgtaccgagcctcgggtaaatttgagcttcttgatagaattcttcccaaactccgagcaaccaaccacaaagtgctgctgttctgccaaatgacctccctcatgaccatcatggaagattactttgcgtatcgcggctttaaatacctcaggcttgatggaaccacgaaggcggaggaccggggcatgctgctgaaaaccttcaacgagcccggctctgagtacttcatcttcctgctcagcacccgggctggggggctcggcctgaacctccagtcggcagacactgtgatcatttttgacagcgactggaatcctcaccaggacctgcaagcgcaggaccgagcccaccgcatcgggcagcagaacgaggtgcgtgtgctccgcctctgcaccgtcaacagcgtggaggagaagatcctagctgcagccaagtacaagctcaacgtggaccagaaggtgatccaggccggcatgttcgaccagaagtcctccagccatgagcggcgcgccttcctgcaggccatcctggagcacgaggagcaggatgagagcagacactgcagcacgggcagcggcagtgccagcttcgcccacactgcccctccgccagcgggcgtcaaccccgacttggaggagccacctctaaaggaggaagacgaggtgcccgacgacgagaccgtcaaccagatgatcgcccggcacgaggaggagtttgatctgttcatgcgcatggacctggaccgcaggcgcgaggaggcccgcaaccccaagcggaagccgcgcctcatggaggaggacgagctcccctcgtggatcatcaaggacgacgcggaggtggagcggctgacctgtgaggaggaggaggagaagatgttcggccgtggctcccgccaccgcaaggaggtggactacagcgactcactgacggagaagcagtggctcaaggccatcgaggagggcacgctggaggagatcgaagaggaggtccggcagaagaaatcatcacggaagcgcaagcgagacagcgacgccggctcctccaccccgaccaccagcacccgcagccgcgacaaggacgacgagagcaagaagcagaagaagcgcgggcggccgcctgccgagaaactctcccctaacccacccaacctcaccaagaagatgaagaagattgtggatgccgtgatcaagtacaaggacagcagcagtggacgtcagctcagcgaggtcttcatccagctgccctcgcgaaaggagctgcccgagtactacgagctcatccgcaagcccgtggacttcaagaagataaaggagcgcattcgcaaccacaagtaccgcagcctcaacgacctagagaaggacgtcatgctcctgtgccagaacgcacagaccttcaacctggagggctccctgatctatgaagactccatcgtcttgcagtcggtcttcaccagcgtgcggcagaaaatcgagaaggaggatgacagtgaaggcgaggagagtgaggaggaggaagagggcgaggaggaaggctccgaatccgaatctcggtccgtcaaagtgaagatcaagcttggccggaaggagaaggcacaggaccggctgaagggcggccggcggcggccgagccgagggtcccgagccaagccggtcgtgagtgacgatgacagtgaggaggaacaagaggaggaccgctcaggaagtggcagcgaagaagactgagccccgacattccagtctcgaccccgagcccctcgttccagagctgagatggcataggccttagcagtaacgggtagcagcagatgtagtttcagacttggagtaaaactgtataaacaaaagaatcttccatatttatacagcagagaagctgtaggactgtttgtgactggccctgtcctggcatcagtagcatctgtaacagcattaactgtcttaaagagagagagagagaattccgaattggggaacacacgatacctgtttttcttttccgttgctggcagtactgttgcgccgcagtttggagtcactgtagttaagtgtggatgcatgtgcgtcaccgtccactcctcctactgtattttattggacaggtcagactcgccgggggcccggcgagggtatgtcagtgtcactggatgtcaaacagtaataaattaaaccaacaacaaaacgcacagccaaaaaaaaa

SEQ ID NO: 919 - DNA, 1717 bp, Homo sapiens
aacgccagcgcctgcgcactgagggcggcctggtcgtcgtctgcggcggcggcggcggctgaggagcccggctgaggcgccagtacccggcccggtccgcatttcgccttccggcttcggtttccctcggcccagcacgccccggccccgccccagccctcctgatccctcgcagcccggctccggccgcccgcctctgccgccgcaatgatgatgatggcgctgagcaagaccttcgggcagaagcccgtgaagttccagctggaggacgacggcgagttctacatgatcggctccgaggtgggaaactacctccgtatgttccgaggttctctgtacaagagatacccctcactctggaggcgactagccactgtggaagagaggaagaaaatagttgcatcgtcacatggtaaaaaaacaaaacctaacactaaggatcacggatacacgactctagccaccagtgtgaccctgttaaaagcctcggaagtggaagagattctggatggcaacgatgagaagtacaaggctgtgtccatcagcacagagccccccacctacctcagggaacagaaggccaagaggaacagccagtgggtacccaccctgcccaacagctcccaccacttagatgccgtgccatgctccacaaccatcaacaggaaccgcatgggccgagacaagaagagaaccttccccctttgctttgatgaccatgacccagctgtgatccatgagaacgcatctcagcccgaggtgctggtccccatccggctggacatggagatcgatgggcagaagctgcgagacgccttcacctggaacatgaatgagaagttgatgacgcctgagatgttttcagaaatcctctgtgacgatctggatttgaacccgctgacgtttgtgccagccatcgcctctgccatcagacagcagatcgagtcctaccccacggacagcatcctggaggaccagtcagaccagcgcgtcatcatcaagctgaacatccatgtgggaaacatttccctggtggaccagtttgagtgggacatgtcagagaaggagaactcaccagagaagtttgccctgaagctgtgctcggagctggggttgggcggggagtttgtcaccaccatcgcatacagcatccggggacagctgagctggcatcagaagacctacgccttcagcgagaaccctctgcccacagtggagattgccatccggaacacgggcgatgcggaccagtggtgcccactgctggagactctgacagacgctgagatggagaagaagatccgcgaccaggacaggaacacgaggcggatgaggcgtcttgccaacacggccccggcctggtaaccagcccatcagcacacggctcccacggagcatctcagaagattgggccgcctctcctccatcttctggcaaggacagaggcgaggggacagcccagcgccatcctgaggatcgggtgggggtggagtgggggcttccaggtggcccttcccggcacacattccatttgttgagccccagtcctgccccccaccccaccctccctacccctccccagtctctggggtcaggaagaaaccttattttaggttgtgttttgtttttgtataggagccccaggcagggctagtaacagtttttaaataaaaggcaacaggtcatgttcaatttcttcaacaaaaaaaaaaaaaaa

SEQ ID NO: 920 - DNA, 5780 bp, Homo sapiens
ctgggcggggccgggaagcggcagtggcggctacgcgcgcgggggtgcgcgcgggaacgaccgggaaacaccgcgagggccggggtgggccaggctgtggggacgacgggctgcgacgatggccgcagcggcgggcggcggcgggccggggacagcggtaggcgccacgggctcggggattgcggcggcagccgcaggcctagctgtttatcgacggaaggatgggggcccggccaccaagttttgggagagcccggagacggtgtcccagctggattcggtgcgggtctggctgggcaagcactacaagaagtatgttcatgcggatgctcctaccaataaaacactggctgggctggtggtgcagcttcttcagttccaggaagatgcctttgggaagcatgtcaccaacccggccttcaccaaactccctgcaaagtgtttcatggatttcaaagctggaggcgccttatgtcacattcttggggctgcttacaagtataaaaatgaacagggatggcggaggtttgacctacagaacccatctcgaatggatcgtaatgtggaaatgtttatgaacattgaaaaaacattggtgcagaacaattgtttgaccagacccaacatctacctcattccagacattgatctgaagttggctaacaaattgaaagatatcatcaaacgacatcagggaacatttacggatgagaagtcaaaagcttcccaccacatttacccatattcttcctcacaagacgatgaagaatggttgagaccggtgatgagaaaagagaagcaagtgttagtgcattggggcttttacccagacagctatgatacttgggtccatagtaatgatgttgatgctgaaattgaagatccaccaattccagaaaaaccatggaaggttcatgtgaaatggattttggacactgatattttcaatgaatggatgaatgaggaggattatgaggtggatgaaaataggaagcctgtgagttttcgtcagcggatttcaaccaagaatgaagagccagtcagaagtccagaaagaagagatagaaaagcatcagctaatgctcgaaagaggaaacattcgccttcgcctccccctccgacaccaacagaatcacggaagaagagtgggaagaaaggccaagctagcctttatgggaagcgcagaagtcagaaagaggaagatgagcaagaagatctaaccaaggatatggaagacccaacacctgtacccaatatagaagaagtagtacttcccaaaaatgtgaacctaaagaaagatagtgaaaatacacctgttaaaggaggaactgtagcggatctagatgagcaggatgaagaaacagtcacagcaggaggaaaggaagatgaagatcctgccaaaggtgatcagagtcgatcagttgaccttggggaagataatgtgacagagcagaccaatcacattattattcctagttatgcatcatggtttgattataactgtattcatgtgattgaacggcgtgctcttcctgagttcttcaatggaaaaaacaaatccaagactccagaaatatacttggcatatcgaaattttatgattgacacgtatcgtctaaacccccaagagtatttaactagcactgcttgtcggaggaacttgactggagatgtgtgtgctgtgatgagggtccatgcctttttagagcagtggggactcgttaattaccaagttgacccggaaagtagacccatggcaatgggacctcctcctactcctcattttaatgtattagctgataccccctctgggcttgtgcctctgcatcttcgatcacctcaggttcctgctgctcaacagatgctaaattttcctgagaaaaacaaggaaaaaccagttgatttgcagaactttggtctccgtactgacatttactccaagaaaacattagcaaagagtaaaggtgctagtgctggaagagaatggactgaacaggagacccttctactcctggaggccctggagatgtacaaggatgattggaacaaagtgtcggaacatgttggaagtcgtactcaggatgaatgcatcctccactttttgagacttcccattgaggacccataccttgagaattcagatgcttcccttgggcctttggcctaccagcctgtccccttcagtcagtcaggaaatccagttatgagtactgttgcttttttggcatctgtggtggaccctcgcgtggcatctgctgcagcaaaagcggctttggaggagttttctcgggtccgggaggaggtaccactggaattggttgaagctcatgtcaagaaagtacaagaagcagcacgagcctctgggaaagtggatcccacctacggtctggagagcagctgcattgcaggcacagggcccgatgagccagagaagcttgaaggagctgaagaggaaaaaatggaagccgaccctgatggtcagcagcctgaaaaggcagaaaataaagtggaaaatgaaacggatgaaggtgataaagcacaagatggagaaaatgaaaaaaatagtgaaaaggaacaggatagtgaagtgagtgaggataccaaatcagaagaaaaggagactgaagagaacaaagaactcactgatacatgtaaagaaagagaaagtgatactgggaagaagaaagtagaacatgaaatttccgaaggaaatgttgccacagccgcagcagctgctcttgcctcagcggctaccaaagccaagcacctggctgcagtggaagaaagaaagatcaagtccctggtagctctcttggttgagacacaaatgaagaaactagagatcaaacttcgacattttgaagagctggaaactatcatggacagagagaaagaagctctagaacaacagaggcagcagttgcttactgaacgccaaaacttccacatggaacagctgaagtatgctgaattacgagcacgacagcaaatggaacagcagcagcatggccagaaccctcaacaggcacaccagcactcaggaggacctggcctggccccacttggagcagcagggcaccctggcatgatgcctcatcaacagccccctccctaccctctgatgcaccaccagatgccaccacctcatccaccccagccaggtcagataccaggcccaggttccatgatgcccgggcagcacatgccaggccgcatgattcccactgttgcagccaacatccacccctctgggagtggccctacccctcctggcatgccaccaatgccaggaaacatcttaggaccccgggtacccctgacagcacctaacggcatgtatccccctccaccacagcagcagccaccgccaccaccacctgcagatggggtccctccgcctcctgctcctggcccgccagcctcagctgctccttagcctggaagatgcagggaacctccacgcccaccaccatgagctggagtggggatgacaagacttgtgttcctcaactttcttgggtttctttcaggatttttcttctcacagctccaagcacgtgtcccgtgcctccccactcctcttaccacccctctctctgacactttttgtgttgggtcctcagccaacactcaaggggaaacctgtagtgacagtgtgccctggtcatccttaaaataacctgcatctcccctgtcctggtgtgggagtaagctgacagtttctctgcaggtcctgtcaactttagcatgctatgtctttaccatttttgctctcttgcagttttttgctttgtcttatgcttctatggataatgctatataatcattatctttttatctttctgttattattgttttaaaggagagcatcctaagttaataggaaccaaaaaataatgatgggcagaagggggggaatagccacaggggacaaaccttaaggcattataagtgaccttatttctgcttttctgagctaagaatggtgctgatggtaaagtttgagacttttgccacacacaaatttgtgaaaattaaacgagatgtggaaggagaacctcagtgattttattccctagtgaggcctctgagggcctccacactgcctggcagaacataccactgaactagtatgtgctagaggagggcacaaacatccgctccttccctaggcctgctggctctggttttctatgcagatgattcattggattgggggtgagtgttttgtttttctgggggcagtgtgagctttgagggttggaatattgggaggcattccttagtttcctcaactagcctggaaagttaggagtctagggtaattacccccaatgagtctagcctactattcactgctttgtgtgcatttttttctccctctttaaaaaaccctttaaaagaaaaaaaaaagtagatagtgctaaatattttagctcatgaaacttggttaggatggctgggggtacaagtccccaaactacctcttgttacagtagccagggagtggaatttcgtcaaccggtacttttaaggttaggatgggacgggaaaagtgaagcaggatattagctccttataccttctcccttccatttctgagatctcacattccatctatcacagggttttcaaagagatgctgagggtaacaaggaactcacttggcagtcagagcatcatgctttgaggtttggggtgctcaggctgggagggtagaatgccattccagaggacaagccacaaaaatgccttaatttgagctcgtatttacccctgctgataagtgacttgagagttcccggttttttcctcttgtccttccctcccttctgtccttccatgtgtggggaaagggtgtttttggtagagcttggtttccaaagcgcctggctttctcacttcacattctcaagtggcagtttcattatttagaatgcaaggtggacatcttttggatatctttttctatatattttctaaagctttacatatgagagggtatagggaggtgtttataaaacacttgagaacttttttccttaatatcagaaagcaaaaaaataaaaccacaattgagatttgcctttcaaaccctcaggtttgcctctaaccaggtgtccctggtcaccatcagagtactggaatacgggaaccgaggagaccttggtccttttgtttttgttctggactcttgggagtggaaatgagaatgagtttattcctactggagcttagttccaatgcatttggctccagaaagaccccagtgccttttgacaatggccagggttttacctacttcctgccagtctttcccaaaggaaactcattccaaatacttcttttttcccctggagtccgagaaggaaaatggaattctggttcatactgtggtcccttgtaacctcaggtctttaatgtgatcactttcaaatttaaaagatccaggtggaaatatttttactatagtaataattctacaaaatacctgaattcttaacactgttatatttcagtataagtggtggctttttcttttcatgtctttgatctggttttattcctgtaattcagccacctgattttgtgaggggggggaataatatgtggtttttgtacaaacatgtttctcagtgtgttgttattttggaaaaaatgaggggagggagtttggcaagaatggagaaaatgaatgaagaaggcctaatctctctctttttcagtgaataaatggaacaccatttctggattctaaaaaaaaaaaaaaaaaaaaaaaa

SEQ ID NO: 921 - DNA, 5588 bp, Homo sapiens
gcggccgcggcggcgggaggcggcgggaggcgggcggaggaggaggcggaggaggcgggagctgagctgagtggggcgggcggcggcggggcccgagccggagaagatggcggtgcggaagaaggacggcggccccaacgtgaagtactacgaggccgcggacaccgtgacccagttcgacaacgtgcggctgtggctcggcaagaactacaagaagtatatacaagctgaaccacccaccaacaagtccctgtctagcctggttgtacagttgctacaatttcaggaagaagtttttggcaaacatgtcagcaatgcaccgctcactaaactgccgatcaaatgtttcctagatttcaaagcgggaggctccttgtgccacattcttgcagctgcctacaaattcaagagtgaccagggatggcggcgttacgatttccagaatccatcacgcatggaccgcaatgtggaaatgtttatgaccattgagaagtccttggtgcagaataattgcctgtctcgacctaacatttttctgtgcccagaaattgagcccaaactactagggaaattaaaggacattatcaagagacaccagggaacagtcactgaggataagaacaatgcctcccatgttgtgtatcctgtcccggggaatctagaagaagaggaatgggtacgaccagtcatgaagagggataagcaggttcttctgcactggggctactatcctgacagttacgacacgtggatcccagcgagtgaaattgaggcatctgtggaagatgctccaactcctgagaaacctaggaaggttcatgcaaagtggatcctggacaccgacaccttcaatgaatggatgaatgaggaagactatgaagtaaatgatgacaaaaaccctgtctcccgccgaaagaagatttcagccaagacactgacagatgaggtgaacagcccagattcagatcgacgggacaagaaggggggaaactataagaagaggaagcgctccccctctccttcaccaaccccagaagcaaagaagaaaaatgctaagaaaggtccctcaacaccttacactaagtcaaagcgtggccacagagaagaggagcaagaagacctgacaaaggacatggacgagccctcaccagtccccaatgtagaagaggtgacacttcccaaaacagtcaacacaaagaaagactcagagtcggccccagtcaaaggcggcaccatgaccgacctggatgaacaggaagatgaaagcatggagacgacgggcaaggatgaggatgagaacagtacggggaacaagggagagcagaccaagaatccagacctgcatgaggacaatgtgactgaacagacccaccacatcatcattcccagctacgctgcctggtttgactacaatagtgttcatgccattgagcggagggctctccccgagttcttcaacggcaagaacaagtccaagactccagagatctacctggcctatcgaaactttatgattgacacttaccgactgaacccccaagagtatcttacctctaccgcctgccgccgaaacctagcgggtgatgtctgtgccatcatgagggtccatgccttcctagaacagtggggtcttattaactaccaggtggatgctgagagtcgaccaaccccaatggggcctccgcctacctctcacttccatgtcttggctgacacaccatcagggctggtgcctctgcagcccaagacacctcagcagacctctgcttcccaacaaatgctcaactttcctgacaaaggcaaagagaaaccaacagacatgcaaaactttgggctgcgcacagacatgtacacaaaaaagaatgttccctccaagagcaaggctgcagccagtgccactcgtgagtggacagaacaggaaaccctgcttctcctggaggcactggaaatgtacaaagatgactggaacaaagtgtccgagcatgtgggaagccgcacacaggacgagtgcatcttgcattttcttcgtcttcccattgaagacccatacctggaggactcagaggcctccctaggccccctggcctaccaacccatccccttcagtcagtcgggcaaccctgttatgagcactgttgccttcctggcctctgtcgtcgatccccgagtcgcctctgctgctgcaaagtcagccctagaggagttctccaaaatgaaggaagaggtacccacggccttggtggaggcccatgttcgaaaagtggaagaagcagccaaagtaacaggcaaggcggaccctgccttcggtctggaaagcagtggcattgcaggaaccacctctgatgagcctgagcggattgaggagagcgggaatgacgaggctcgggtggaaggccaggccacagatgagaagaaggagcccaaggaaccccgagaaggagggggtgctatagaggaggaagcaaaagagaaaaccagcgaggctcccaagaaggatgaggagaaagggaaagaaggcgacagtgagaaggagtccgagaagagtgatggagacccaatagtcgatcctgagaaggagaaggagccaaaggaagggcaggaggaagtgctgaaggaagtggtggagtctgagggggaaaggaagacaaaggtggagcgggacattggcgagggcaacctctccaccgctgctgccgccgccctggccgccgccgcagtgaaagctaagcacttggctgctgttgaggaaaggaagatcaaatctttggtggccctgctggtggagacccagatgaaaaagttggagatcaaacttcggcactttgaggagctggagactatcatggaccgggagcgagaagcactggagtatcagaggcagcagctcctggccgacagacaagccttccacatggagcagctgaagtatgcggagatgagggctcggcagcagcacttccaacagatgcaccaacagcagcagcagccaccaccagccctgcccccaggctcccagcctatccccccaacaggggctgctgggccacccgcagtccatggcttggctgtggctccagcctctgtagtccctgctcctgctggcagtggggcccctccaggaagtttgggcccttctgaacagattgggcaggcagggtcaactgcagggccacagcagcagcaaccagctggagccccccagcctggggcagtcccaccaggggttcccccccctggaccccatggcccctcaccgttccccaaccaacaaactcctccctcaatgatgccaggggcagtgccaggcagcgggcacccaggcgtggcgggtaatgctcctttgggtttgccttttggcatgccgcctcctcctcctcctcctgctccatccatcatcccatttggtagtctagctgactccatcagtattaacctccccgctcctcctaacctgcatgggcatcaccaccatctcccgttcgccccgggcactctccccccacctaacctgcctgtgtccatggcgaaccctctacatcctaacctgccggcgaccaccaccatgccatcttccttgcctctcgggccggggctcggatccgccgcagcccaaagccctgccattgtggcagctgttcagggcaacctcctgcccagtgccagcccactgccagacccaggcacccccctgcctccagaccccacagccccgagcccaggcacggtcacccctgtgccacctccacagtgaggagccagccagacatctctccccctcaccccctgtggacatcacggttccaggaacagcccttcccccaccactgggaccctccccagcctggagagttcatcactacgtaaggaaagctccttccgcccctccaaagccctcaccatgcctaacagaggcatgcatttttatatcagattattcaaggacttctgtttaaaagatgtttataatgtctgggagagaggataggatgggaatgctgccctaaaggaagggctggtgaaaggtgtttatacaaggttctattaaccacttctaagggtacacctccctccaaactactgcattttctatggattaaaaaaaaaaaaaaaaagtagattttaaaaagccacattggagctcccttctacccactaaaaaataaccaatttttacattttttgagggggagtgagttttaggaaaggggaattaagattccagggagagctctggggatagaacagggcgcagattccatctctccccaagcccctttttagtgactaagtcaaggccccaactcccctcccccaccctacgctgagcttattcgagttcattcgtactaataatccctcctgcggcttcctcattgttgctgttttaggccaccccagctcagccaatgattcctttccctctgaatgtcagttttgtttttaaaagtcacttgcttagttgatgtcagcgtatgtgtatttggtggggaaaacctaatttcggggatttctgtggtaggtaataggagaagaaagggcactgggggctgttctccttccttccctgggctgtatccatggactcctggaaggcacagagaagggagctataagaggatgtgaagttttaaaacctgaaattgttttttaaagcacttaagcacctccatattatgacttggtgggtcaccccttagcttcctccctctcccaccaagactatgagaacttcagctgatagctgggggctccccagatgaggatgcagggatttgggagcagtggaagagggtgcccaaccttgggttggaccaacccttggctcgcagctcaactctgcttcccgcattcctgctccacgtgtcccagcttctcccctgtgacgggaaggcaggtgtgactccaggctctgcactggttcttcttggttcctcccaccaggccctttgttcctcatgtccccatgtttctctccctctgcgtcttagcacctttcttctgttcaaagttttctgtaaattttctctttttttctttctttcttttttttttttttataaattaatttgctttcagttccatcttgtgggtgcattctgtgttcttacctgtggctgtcaggcagggggattgtgatgggagcagctttcctggagtccttcacagcggcgtttacctgggccgaaagacactctgcaagccacacggcctacagacactgcgcctccccacaaaacacgaacggcagcacaactgtcgagactatgtgctggtataggagcagaggctctcacctgccctaaaagctgtttaagacttggaaggacattcccacaacatggaattttgtatctctgtcccttcagaagtagtggtttcactccttcccttattagagaggaggcaagccccttacctacttttgttataattggcccttcaccctgctgaggtgacggacaggcttaggcagtgctaataatggcctggctttagctccaataaacactccacaggcttccccacaaaaggccttattgggagcttgggagggcgggggccagatttaaggagctggaagggtagga

SEQ ID NO: 922 - DNA, 2425 bp, Homo sapiens
gctccggacgcgaggggcggggcgagcgcgggacaaagggaagcgaagccggagctgcgggcgctttttctgcccgcggtgtctcagattcattcttaaggaactgagaacttaatcttccaaaatgtcaaaaagaccatcttatgccccacctcccaccccagctcctgcaacacaaatgcccagcacaccagggtttgtgggatacaatccatacagtcatctcgcctacaacaactacaggctgggagggaacccgggcaccaacagccgggtcacggcatcctctggtatcacgattccaaaacccccaaagccaccagataagccgctgatgccctacatgaggtacagcagaaaggtctgggaccaagtaaaggcttccaaccctgacctaaagttgtgggagattggcaagattattggtggcatgtggcgagatctcactgatgaagaaaaacaagaatatttaaacgaatacgaagcagaaaagatagagtacaatgaatctatgaaggcctatcataattcccccgcgtaccttgcttacataaatgcaaaaagtcgtgcagaagctgctttagaggaagaaagtcgacagagacaatctcgcatggagaaaggagaaccgtacatgagcattcagcctgctgaagatccagatgattatgatgatggcttttcaatgaagcatacagccaccgcccgtttccagagaaaccaccgcctcatcagtgaaattcttagtgagagtgtggtgccagacgttcggtcagttgtcacaacagctagaatgcaggtcctcaaacggcaggtccagtccttaatggttcatcagcgaaaactagaagctgaacttcttcaaatagaggaacgacaccaggagaagaagaggaaattcctggaaagcacagattcatttaacaatgaacttaaaaggttgtgcggtctgaaagtagaagtggatatggagaaaattgcagctgagattgcacaggcagaggaacaggcccgcaaaaggcaggaggaaagggagaaggaggccgcagagcaagctgagcgcagtcagagcagcatcgttcctgaggaagaacaagcagctaacaaaggcgaggagaagaaagacgacgagaacattccgatggagacagaggagacacaccttgaagaaacaacagagagccaacagaatggtgaagaaggcacgtctactcctgaggacaaggagagtgggcaggagggggtcgacagtatggcagaggaaggaaccagtgatagtaacactggctcggagagcaacagtgcaacagtggaggagccaccaacagatcccataccagaagatgagaaaaaagaataagtgttgccttgttttgtgtgttctaaatactttttttaatgaaaaaatgttttttggttttaatggtgttacgtggtttgtgtattaattttttttcttgtccatatcacaccaccaaaggcttttggaccatttagcatcatgagcctaatggctcagtcagtcacctttcttaagtgttgtgaagatggctcttttctttggatcttgtttctagccctcaactgctgaaagcctcagaatttagattaattgagaaaacacccacctcttttagagaattatcctttgatgctgcagaatctactcttacaatgccttcctacagctcactggggtgcttaccaaagccatagctttaaaccttcccagtccccatcagtagcttcctgaaagtctcctctcttgtttacttctgcaaagggtagcttcttaaaaacgtgatcatgtatgagtatgtatttgttcacttacccttttttacttttaatcaatgtcagataccaagagttgtgttaagctgagtgtagtgtgtaactaactacacttggatcttactgatccagaaatagtccccatagttagagtagttacttatgaagtggttattaaagtgaacacagcacatatacattatctatactgctttttgttatgattaatactgggtatgttctggtaaatccatccttattgtatagaaaaaaaattacttttttaccaggttttccaaagacagaatagatcacaaagctcaaggaatttaatattcttgtaatggactagataattcaaactgattagcccattccagaagaaaaacagctgggaattaagttaatccacttgaaattgttttacaataatcagaacatccaaacctcaaggctcaggatcccatagaccagagcccacctttttgataaacttagtaaagtcttggagactagaagcaagatagtttgtgacacataagcttcccaaaaactagaatagatttttactgaatagtggtatatctgatggtatatgtttcttaaaggtccaaatgtaataaaaaaaaaa

SEQ ID NO: 923 - DNA, 6863 bp, Homo sapiens
cttgttcctccgccgttgcaatgaactattttctctcagtccggggtggtacttttgagtaaccccttccaaatagaaacccataccagcctatttagctcggtctccactatatgaaggtttcctagggcttggtgtgacgcaacgtatacgaggctcggaaggacaccccgcggaaggatccggtttgttgtggtgtggggaggggagacgctgacaaaccaagatggcggcggcggcgctgaaggccgcggcgtttgggaggtaactgtggtggcgaaggctgcggtagtggggaggcaaccacacagtttggaagaaacggagcgggacgaagaggcggtagcagtagagtcagcctgagactctcagagcacgacggccacacgcccccttaggccctcggcgggcggcggctgccccgcttagggcctagcctccgagcattgcctcggcttcaaacagcggcggcgccatgagtccttaagggcggtccaagcctcccgatccctggcccagacctcgggcccaccatggagccggggtccgacgatttcctaccgccaccggagtgcccggtgttcgagcctagctgggccgagttccgagaccctcttggctacatcgcgaaaatcaggcccatcgcagagaaatcgggcatttgcaagatccgcccacccgcggactggcagccaccctttgctgtggaagtggacaacttcaggtttaccccccgaatccagaggctgaatgagctagaggcccagacgagagtgaaactgaactacttggaccagattgccaaattctgggaaatccagggctcctccttaaagattcccaatgtagaacggcggatcttggacctctacagtctcagcaaaattgtggtggaggaaggtggttatgaagctatctgcaaggaccgtcggtgggctcgggtagcccagcgcctcaactatccaccaggcaaaaatattggctccttgctacgctcccactacgaacgcattgtttatccctatgaaatgtaccagtctggagccaaccttgtgcagtgtaacacacgtccatttgataatgaggagaaggacaaggaatacaaaccccacagcatccccctacgacagtctgtgcagccttccaagttcaacagctatggccggcgggccaagagactgcagcctgatccggaacccacagaggaagacattgagaagaatccagagctgaaaaagctacagatctatggggcaggccccaagatgatgggcctgggcctcatggccaaagacaagactctgcggaagaaagataaggaggggcctgagtgtccccccacagtagtggtgaaggaggagttaggtggggatgtgaaggtggagtcaacatcgcctaagaccttcctggagagcaaggaggagctgagtcacagcccagaaccctgcaccaagatgaccatgaggctacggaggaaccacagcaatgcccagtttattgagtcatatgtctgccggatgtgttctcgaggggatgaggatgacaagctcctgctgtgtgatggctgtgatgacaactaccacatcttctgcctgctgcctcctctgcctgagatccccaagggtgtctggcggtgcccaaagtgtgtcatggcggagtgtaagcggcccccagaagcctttggctttgagcaggctacccgggaatacactctgcagagctttggcgagatggccgactcctttaaagctgactacttcaacatgcccgtgcatatggtgcccacagaacttgtggagaaggagttctggaggctggtaaatagcattgaggaagatgtgactgttgagtatggagctgacatccattccaaagaatttggcagcggtttccctgtcagtgacagtaaacggcacctaacccccgaagaggaggagtatgctaccagtggttggaacctaaatgtgatgccggtgttggaacagtctgtactgtgccacatcaatgcagatatctctggcatgaaggtgccctggctctacgtgggcatggtcttctcagccttttgctggcatattgaggatcactggagttactccattaactacctccactggggtgagccgaagacctggtatggggtgccctcacttgcagcagaacatttggaagaagtgatgaagaagctgacacctgaactatttgatagccagcctgacctcctgcaccaacttgtcaccctcatgaatcccaacaccctcatgtcccatggtgtgccagttgtccgcacaaaccagtgtgcaggagagtttgtcatcaccttcccccgtgcttaccacagcggcttcaaccaaggctacaactttgccgaggctgtcaacttttgcactgctgactggttgcctgctgggcgccagtgcattgagcactaccgccggctccggagatactgcgtcttctcccatgaggagcttatctgcaagatggctgcctgcccagagaagctagacctgaacctggcggcagctgtgcataaggagatgttcatcatggtgcaagaagagcggcgtctacgaaaggccctgctggagaagggtatcacagaggctgagcgagaggctttcgagctgctcccagatgatgagcgccagtgtatcaagtgcaagactacgtgtttcctgtcagccctggcctgctacgactgcccagacggccttgtctgcctttcccacatcaatgatctctgcaagtgctccagtagccggcagtacctgcggtatcggtataccttggatgagcttcctgccatgctgcataagctgaaggttcgggctgagtcctttgacacctgggccaacaaagtgcgagtggccctggaggtggaggatgggcggaagcgcagccttgaagaactgagggcactagagtctgaagcccgtgagcggaggtttcctaatagtgagctgctgcagcaactaaagaactgcctgagtgaggcagaggcttgcgtgtcccgagctctgggactggtcagcggccaggaagctggcccccacagggtggctggtctacagatgaccctgactgagctccgggcctttctggaccagatgaacaacctgccttgcgccatgcaccagattggggatgtcaagggtgttctggaacaggtggaggcctaccaggctgaggctcgtgaggccctggcctcactgccctccagtccagggctactgcagtccctgttggagagggggcggcagctgggggtggaggtgcctgaggcccagcagctccagcggcaggtggaacaggcgcgatggctggatgaggtgaaacgcacactggccccctcagcccgaaggggcaccttggctgtcatgcgaggactgttggtcgcgggtgccagtgtagcccctagccctgctgtggataaagcccaggccgagctgcaggaactgctgaccattgctgaacgctgggaggagaaagcccacctctgcctggaggccaggcagaagcatccaccagccacacttgaggccataatccgtgaagcggaaaacatccctgttcacctgcccaacatccaggctctcaaggaggctcttgctaaggcccgggcctggattgctgatgttgatgagatccaaaatggtgaccactacccctgcctggatgacttggagggcctagtagctgtgggccgggacctacctgtggggctggaggagctgagacagctagagctacaggtactgacagcgcactcctggagggagaaggcctccaagaccttcctcaagaaaaattcttgctacacgctgctggaggttctctgcccatgtgcagatgccggctcagacagcaccaagcgcagccggtggatggagaaggagctggggttgtacaaatctgacacagagctgctggggctgtctgcgcaggacctcagggacccaggctctgtgatcgtggccttcaaggagggggaacagaaggagaaggagggtatcctgcagctgcgtcgcaccaattcggccaagcccagtccactggcatcatcgagcacggcctcctctacaacctctatctgtgtgtgtgggcaggtgctggctggggcgggagctctgcagtgtgacctgtgtcaggactggttccatgggcggtgtgtgtcagtgcctcgcctcctcagctctccgaggcccaatcccacctcatccccactgctggcctggtgggaatgggacaccaaattcctgtgtccactgtgtatgcgctcaaggcgcccgcgcctggagaccatcctggcactgctggtagccctgcagagactgcctgtgcggctgcccgagggcgaggccctgcagtgcctcacagagagggccatcagctggcaaggccgcgccaggcaggctctggcctctgaagatgtgactgctcttttgggacggctggctgagctccgccaacggctacaggctgaacctagacctgaggagcctcctaactaccctgcagcccctgcttctgaccccctcagagagggcagtggcaaggatatgcctaaggtccagggcttactggagaatggagacagtgtgaccagtcctgagaaggtagccccggaggagggctcaggtaagagagatctggagctgctgtcctcgctgttgccacagttgactggccctgtgttggaactgcctgaggcaacccgggcccccttggaggagctcatgatggagggggacctgctcgaggtgaccctggatgagaaccacagcatatggcagctgctgcaggctggacagcccccagacctggagaggatccgcacacttctggagctggagaaggcagagcgtcacgggagtcgggctcggggccgggccctggagaggcggcggcggcggaaggtggatcggggtggggagggcgatgacccagcccgagaggagctagagccaaagagggtacggagctcagggccagaggctgaggaggtccaggaggaggaagagctggaggaggagactgggggtgagggcccccctgcacccatccccaccactggcagccccagcacccaggagaaccagaatggcttggaaccggcggaagggaccacttcaggcccctcggcccctttctccactctgactccccggctgcatctgccctgcccacagcagccgcctcagcaacagttgtgacagtggctgagcctagcacagaccctgacagagacccccctcggcctcaaggatcctctttctgaccatcaagcctgcttcttggggggtgggcgggtaggggggtggccatccctgctacccgcccacccctgagtcccttgacttttgtattctgactccaaggtattgttcagacctcagctcctgggggccggcccctggagtcttccctccctggtagcctctaaccagcattcccagacacctgaggcagatagatggatgggctggtgggcaggggggtggctggggctgggccatcaccattccagagacaaggccagtgtatatgcaaactgggggactctcctcccttctctccccagttctggtcctggccaggccatgctacactaacccctgcccccactctcctcccctcttttccttccttcctacccccttctccctctcccttcccctgactgttccacccaggaggaggaaacttcacatagccgtgctcacagttttttattttaaaggaatttggctggggagctgaacagggctccctgtgatctgaagaaagcttttggtgcttgtcctcacaaccacctcagtcctccctccctgtcctcccctgtctcctttcctcctcctgggttcatgttgtaataaaagaagattgttggtgtgtaattaatttgttcaaaagaaaaaaaaaagcaaaacaagaaacttggttccaactgaagcctattttaattttattttattattttcctcttgttagaaataaaacccttagaaacattttttggaaacatgtttctgaagtgcatttctcttagacggggaagacagtgcttccatcaccagtcagtggagcagctgtagtgctggcaggagcactagggctgaagccagggagctctgggttctgaaatcaagttccaccagcttcttaaccttgggcaagacattctgatcctcccccgactctaaccccaagccactttccctcaagtccaaacagatgggctcgggccccctcacccaaactcctacactacaacctcccccagttgatgccctccagtttatcctcctcaagctcccaaagggatttttttgttaatggctttattgagatataatttacatactataaaattcacttgtttgaaatgtacaattcagtgatttggggggtttctaaagtgtagatctgattatatactgcttaaaaccttccatgatgctttattgcccttaagattatacatagaatctcgttcttcctagaatgttttcctgtctaacccatctactgcataattccctgatttttctccacaggttatgcccctgatgaatggggactaaagctcagatgtgtggtcatttgcaacccctgagttcacttttttaagacagcttattgatatatataatgtacataccatacagtcacccacttaaaagtatacaattaaatagcttttagtatattcagagttgtgcagccatcattcgaaaaaaaatttcagaacattttcatcactgcagaaagaaactccatatcccttaggcgtcctttacccctcatcccatttgcctattctggacattttacataaatggaatcgtataatatgtgaa

SEQ ID NO: 924 - DNA, 6097 bp, Homo sapiens
cttgttcctccgccgttgcaatgaactattttctctcagtccggggtggtacttttgagtaaccccttccaaatagaaacccataccagcctatttagctcggtctccactatatgaaggtttcctagggcttggtgtgacgcaacgtatacgaggctcggaaggacaccccgcggaaggatccggtttgttgtggtgtggggaggggagacgctgacaaaccaagatggcggcggcggcgctgaaggccgcggcgtttgggaggtaactgtggtggcgaaggctgcggtagtggggaggcaaccacacagtttggaagaaacggagcgggacgaagaggcggtagcagtagagtcagcctgagactctcagagcacgacggccacacgcccccttaggccctcggcgggcggcggctgccccgcttagggcctagcctccgagcattgcctcggcttcaaacagcggcggcgccatgagtccttaagggcggtccaagcctcccgatccctggcccagacctcgggcccaccatggagccggggtccgacgatttcctaccgccaccggagtgcccggtgttcgagcctagctgggccgagttccgagaccctcttggctacatcgcgaaaatcaggcccatcgcagagaaatcgggcatttgcaagatccgcccacccgcgattgtggtggaggaaggtggttatgaagctatctgcaaggaccgtcggtgggctcgggtagcccagcgcctcaactatccaccaggcaaaaatattggctccttgctacgctcccactacgaacgcattgtttatccctatgaaatgtaccagtctggagccaaccttgtgcagtgtaacacacgtccatttgataatgaggagaaggacaaggaatacaaaccccacagcatccccctacgacagtctgtgcagccttccaagttcaacagctatggccggcgggccaagagactgcagcctgatccggaacccacagaggaagacattgagaagaatccagagctgaaaaagctacagatctatggggcaggccccaagatgatgggcctgggcctcatggccaaagacaagactctgcggaagaaagataaggaggggcctgagtgtccccccacagtagtggtgaaggaggagttaggtggggatgtgaaggtggagtcaacatcgcctaagaccttcctggagagcaaggaggagctgagtcacagcccagaaccctgcaccaagatgaccatgaggctacggaggaaccacagcaatgcccagtttattgagtcatatgtctgccggatgtgttctcgaggggatgaggatgacaagctcctgctgtgtgatggctgtgatgacaactaccacatcttctgcctgctgcctcctctgcctgagatccccaagggtgtctggcggtgcccaaagtgtgtcatggcggagtgtaagcggcccccagaagcctttggctttgagcaggctacccgggaatacactctgcagagctttggcgagatggccgactcctttaaagctgactacttcaacatgcccgtgcatatggtgcccacagaacttgtggagaaggagttctggaggctggtaaatagcattgaggaagatgtgactgttgagtatggagctgacatccattccaaagaatttggcagcggtttccctgtcagtgacagtaaacggcacctaacccccgaagaggaggagtatgctaccagtggttggaacctaaatgtgatgccggtgttggaacagtctgtactgtgccacatcaatgcagatatctctggcatgaaggtgccctggctctacgtgggcatggtcttctcagccttttgctggcatattgaggatcactggagttactccattaactacctccactggggtgagccgaagacctggtatggggtgccctcacttgcagcagaacatttggaagaagtgatgaagaagctgacacctgaactatttgatagccagcctgacctcctgcaccaacttgtcaccctcatgaatcccaacaccctcatgtcccatggtgtgccagttgtccgcacaaaccagtgtgcaggagagtttgtcatcaccttcccccgtgcttaccacagcggcttcaaccaaggctacaactttgccgaggctgtcaacttttgcactgctgactggttgcctgctgggcgccagtgcattgagcactaccgccggctccggagatactgcgtcttctcccatgaggagcttatctgcaagatggctgcctgcccagagaagctagacctgaacctggcggcagctgtgcataaggagatgttcatcatggtgcaagaagagcggcgtctacgaaaggccctgctggagaagggtatcacagaggctgagcgagaggctttcgagctgctcccagatgatgagcgccagtgtatcaagtgcaagactacgtgtttcctgtcagccctggcctgctacgactgcccagacggccttgtctgcctttcccacatcaatgatctctgcaagtgctccagtagccggcagtacctgcggtatcggtataccttggatgagcttcctgccatgctgcataagctgaaggttcgggctgagtcctttgacacctgggccaacaaagtgcgagtggccctggaggtggaggatgggcggaagcgcagccttgaagaactgagggcactagagtctgaagcccgtgagcggaggtttcctaatagtgagctgctgcagcaactaaagaactgcctgagtgaggcagaggcttgcgtgtcccgagctctgggactggtcagcggccaggaagctggcccccacagggtggctggtctacagatgaccctgactgagctccgggcctttctggaccagatgaacaacctgccttgcgccatgcaccagattggggatgtcaagggtgttctggaacaggtggaggcctaccaggctgaggctcgtgaggccctggcctcactgccctccagtccagggctactgcagtccctgttggagagggggcggcagctgggggtggaggtgcctgaggcccagcagctccagcggcaggtggaacaggcgcgatggctggatgaggtgaaacgcacactggccccctcagcccgaaggggcaccttggctgtcatgcgaggactgttggtcgcgggtgccagtgtagcccctagccctgctgtggataaagcccaggccgagctgcaggaactgctgaccattgctgaacgctgggaggagaaagcccacctctgcctggaggccaggcagaagcatccaccagccacacttgaggccataatccgtgaagcggaaaacatccctgttcacctgcccaacatccaggctctcaaggaggctcttgctaaggcccgggcctggattgctgatgttgatgagatccaaaatggtgaccactacccctgcctggatgacttggagggcctagtagctgtgggccgggacctacctgtggggctggaggagctgagacagctagagctacaggtactgacagcgcactcctggagggagaaggcctccaagaccttcctcaagaaaaattcttgctacacgctgctggaggttctctgcccatgtgcagatgccggctcagacagcaccaagcgcagccggtggatggagaaggagctggggttgtacaaatctgacacagagctgctggggctgtctgcgcaggacctcagggacccaggctctgtgatcgtggccttcaaggagggggaacagaaggagaaggagggtatcctgcagctgcgtcgcaccaattcggccaagcccagtccactggcatcatcgagcacggcctcctctacaacctctatctgtgtgtgtgggcaggtgctggctggggcgggagctctgcagtgtgacctgtgtcaggactggttccatgggcggtgtgtgtcagtgcctcgcctcctcagctctccgaggcccaatcccacctcatccccactgctggcctggtgggaatgggacaccaaattcctgtgtccactgtgtatgcgctcaaggcgcccgcgcctggagaccatcctggcactgctggtagccctgcagagactgcctgtgcggctgcccgagggcgaggccctgcagtgcctcacagagagggccatcagctggcaaggccgcgccaggcaggctctggcctctgaagatgtgactgctcttttgggacggctggctgagctccgccaacggctacaggctgaacctagacctgaggagcctcctaactaccctgcagcccctgcttctgaccccctcagagagggcagtggcaaggatatgcctaaggtccagggcttactggagaatggagacagtgtgaccagtcctgagaaggtagccccggaggagggctcagatctggagctgctgtcctcgctgttgccacagttgactggccctgtgttggaactgcctgaggcaacccgggcccccttggaggagctcatgatggagggggacctgctcgaggtgaccctggatgagaaccacagcatccctgagtcccttgacttttgtattctgactccaaggtattgttcagacctcagctcctgggggccggcccctggagtcttccctccctggtagcctctaaccagcattcccagacacctgaggcagatagatggatgggctggtgggcaggggggtggctggggctgggccatcaccattccagagacaaggccagtgtatatgcaaactgggggactctcctcccttctctccccagttctggtcctggccaggccatgctacactaacccctgcccccactctcctcccctcttttccttccttcctacccccttctccctctcccttcccctgactgttccacccaggaggaggaaacttcacatagccgtgctcacagttttttattttaaaggaatttggctggggagctgaacagggctccctgtgatctgaagaaagcttttggtgcttgtcctcacaaccacctcagtcctccctccctgtcctcccctgtctcctttcctcctcctgggttcatgttgtaataaaagaagattgttggtgtgtaattaatttgttcaaaagaaaaaaaaaagcaaaacaagaaacttggttccaactgaagcctattttaattttattttattattttcctcttgttagaaataaaacccttagaaacattttttggaaacatgtttctgaagtgcatttctcttagacggggaagacagtgcttccatcaccagtcagtggagcagctgtagtgctggcaggagcactagggctgaagccagggagctctgggttctgaaatcaagttccaccagcttcttaaccttgggcaagacattctgatcctcccccgactctaaccccaagccactttccctcaagtccaaacagatgggctcgggccccctcacccaaactcctacactacaacctcccccagttgatgccctccagtttatcctcctcaagctcccaaagggatttttttgttaatggctttattgagatataatttacatactataaaattcacttgtttgaaatgtacaattcagtgatttggggggtttctaaagtgtagatctgattatatactgcttaaaaccttccatgatgctttattgcccttaagattatacatagaatctcgttcttcctagaatgttttcctgtctaacccatctactgcataattccctgatttttctccacaggttatgcccctgatgaatggggactaaagctcagatgtgtggtcatttgcaacccctgagttcacttttttaagacagcttattgatatatataatgtacataccatacagtcacccacttaaaagtatacaattaaatagcttttagtatattcagagttgtgcagccatcattcgaaaaaaaatttcagaacattttcatcactgcagaaagaaactccatatcccttaggcgtcctttacccctcatcccatttgcctattctggacattttacataaatggaatcgtataatatgtgaa

SEQ ID NO: 925 - DNA, 1708 bp, Homo sapiens
ggcacggcctagcgagtggttcttctgcgctactgctgcgcgaatcggcgaccccagtgcctcgaccactatgccgcgctctttcctcgtcaggaagccctccgaccccaatcggaagcctaactacagcgagctgcaggactctaatccagagtttaccttccagcagccctacgaccaggcccacctgctggcagccatcccacctccggagatcctcaaccccaccgcctcgctgccaatgctcatctgggactctgtcctggcgccccaagcccagccaattgcctgggcctcccttcggctccaggagagtcccagggtggcagagctgacctccctgtcagatgaggacagtgggaaaggctcccagccccccagcccaccctcaccggctccttcgtccttctcctctacttcagtctcttccttggaggccgaggcctatgctgccttcccaggcttgggccaagtgcccaagcagctggcccagctctctgaggccaaggatctccaggctcgaaaggccttcaactgcaaatactgcaacaaggaatacctcagcctgggtgccctcaagatgcacatccgaagccacacgctgccctgcgtctgcggaacctgcgggaaggccttctctaggccctggctgctacaaggccatgtccggacccacactggcgagaagcccttctcctgtccccactgcagccgtgccttcgctgaccgctccaacctgcgggcccacctccagacccactcagatgtcaagaagtaccagtgccaggcgtgtgctcggaccttctcccgaatgtccctgctccacaagcaccaagagtccggctgctcaggatgtccccgctgaccctcgaggctccctcttcctctccatacctgcccctgcctgacagccttccccagctccagcaggaaggaccccacatccttctcactgccatggaattccctcctgagtgccccacttctggccacatcagccccacaggactttgatgaagaccattttctggttctgtgtcctctgcctgggctctggaagaggccttcccatggccatttctgtggagggagggcagctggcccccagccctgggggattcctgagctggcctgtctgcgtgggtttttgtatccagagctgtttggatacagctgctttgagctacaggacaaaggctgacagactcactgggaagctcccaccccactcaggggaccccactcccctcacacacacccccccacaaggaaccctcaggccaccctccacgaggtgtgactaactatgcaataatccacccccaggtgcagccccagggcctgcggaggcggtggcagactagagtctgagatgccccgagcccaggcagctatttcagcctcctgtttggtggggtggcacctgtttcccgggcaatttaacaatgtctgaaaagggactgtgagtaatggctgtcacttgtcgggggcccaagtggggtgctctggtctgaccgatgtgtctcccagaactattctgggggcccgacaggtgggcctgggaggaagatgtttacatttttaaaggtacactggtatttatatttcaaacattttgtatcaaggaaacgttttgtatagttatatgtacagtttattgatattcaataaagcagttaatttatatattaaaaaaaaaaaaaaaaaa

SEQ ID NO: 926 - DNA, 2101 bp, Homo sapiens
agttcgtaaaggagccgggtgacttcagaggcgccggcccgtccgtctgccgcacctgagcacggcccctgcccgagcctggcccgccgcgatgctgtagggaccgccgtgtcctcccgccggaccgttatccgcgccgggcgcccgccagacccgctggcaagatgccgcgctccttcctggtcaagaagcatttcaacgcctccaaaaagccaaactacagcgaactggacacacatacagtgattatttccccgtatctctatgagagttactccatgcctgtcataccacaaccagagatcctcagctcaggagcatacagccccatcactgtgtggactaccgctgctccattccacgcccagctacccaatggcctctctcctctttccggatactcctcatctttggggcgagtgagtccccctcctccatctgacacctcctccaaggaccacagtggctcagaaagccccattagtgatgaagaggaaagactacagtccaagctttcagacccccatgccattgaagctgaaaagtttcagtgcaatttatgcaataagacctattcaactttttctgggctggccaaacataagcagctgcactgcgatgcccagtctagaaaatctttcagctgtaaatactgtgacaaggaatatgtgagcctgggcgccctgaagatgcatattcggacccacacattaccttgtgtttgcaagatctgcggcaaggcgttttccagaccctggttgcttcaaggacacattagaactcacacgggggagaagcctttttcttgccctcactgcaacagagcatttgcagacaggtcaaatctgagggctcatctgcagacccattctgatgtaaagaaataccagtgcaaaaactgctccaaaaccttctccagaatgtctctcctgcacaaacatgaggaatctggctgctgtgtagcacactgagtgacgcaatcaatgtttactcgaacagaatgcatttcttcactccgaagccaaatgacaaataaagtccaaaggcattttctcctgtgctgaccaaccaaataatatgtatagacacacacacatatgcacacacacacacacacacccacagagagagagctgcaagagcatggaattcatgtgtttaaagataatcctttccatgtgaagtttaaaattactatatatttgctgatggctagattgagagaataaaagacagtaacctttctcttcaaagataaaatgaaaagcacattgcatcttttcttcctaaaaaaatgcaaagatttacattgctgccaaatcatttcaactgaaaagaacagtattgctttgtaatagagtctgtaataggatttcccataggaagagatctgccagacgcgaactcaggtgccttaaaaagtattccaagtttactccattacatgtcggttgtctggttgccattgttgaactaaagcctttttttgattacctgtagtgctttaaagtatatttttaaaagggaggaaaaaaataacaagaacaaaacacaggagaatgtattaaaagtatttttgttttgttttgtttttgccaattaacagtatgtgccttgggggaggagggaaagattagctttgaacattcctggcgcatgctccattgtcttactattttaaaacattttaataatttttgaaaattaattaaagatgggaataagtgcaaaagaggattcttacaaattcattaatgtacttaaactatttcaaatgcataccacaaatgcaataatacaataccccttccaagtgcctttttaaattgtatagttgatgagtcaatgtaaatttgtgtttatttttatatgattgaatgagttctgtatgaaactgagatgttgtctatagctatgtctataaacaacctgaagacttgtgaaatcaatgtttcttttttaaaaaacaattttcaagttttttttacaataaacagttttgatttaaaatctcgtttgtatactattttcagagactttacttgcttcatgattagtaccaaaccactgtacaaagaattgtttgttaacaagaaaaaaa

SEQ ID NO: 927 - DNA, 1676 bp, Homo sapiens
cgcactccagccacagggtccccaactaccggcggctggagacgcagagagaaatcaatggtgcctgctctgcctgtggggggctggtggtgcccctcctcccccgagacaaggaggccccttctgtgcccggtgaccttccccagccctgggaccgctcctcggccgtcgcctgcatctccctgcccctcctgccacggatcgaggaagctctgggggcctctgggctggacgccttggaagtcagcgaggtcgaccctcgggccagccgggccgccattgtacccctcaaagacagcctgaaccacctcaacctgcccccactgctggtgctgcccacacggtggtccccgaccttgggcccagaccggcacggggctccggaaaaactgcttggggctgagcggatgccccgagccccgggcggctttgagtgcttccactgccacaaaccctaccacacgctggccgggctggccaggcaccggcagctgcactgccacctgcaggtggggcgtgtcttcacctgcaagtactgcgacaaggagtacaccagcctgggtgccctcaagatgcacatccgcactcacacgctgccctgcacctgcaagatctgtggcaaggccttctccaggccctggttactgcagggccatgtccgcacccacacaggggagaagccctatgcctgctcgcactgcagcagggcctttgccgaccgctccaaccttcgggcccatctgcaaacgcactcagacgccaagaagtaccggtgccggcgctgcaccaagaccttctcccgcatgtccctcctggcgcggcatgaggagtctggctgctgcccgggcccctgagaggcacgtggtcggcgcaggtaggagggatggtcctcaccgggagagctggcgtccctcctgcccccagaggagccaggagtctgggagggcggggccgggcctcacacttggtgcgtcctccacatctgcgtccaatcagaaccaaagaagtccagcggggggccactgggccggaggacactcccccaggcatcccaccgcgcggagcccactcagaggagactcctctcccggggaaggctttcatcagaacaagagccatggttccatttcgacacggccaggtctccggggctacccttccaagagtcagagcctcggggaggtggccgccagcatgggccggcactgccgccggatggctggcaaggctgcctagttcccttgcagcagaaatgaacagttctgacttatagtgagcacggccctgtggcccttcctcagtaggcacaactacctctcagccagcccccgccagcctttggtttggggtctgggacgagctgccccatgtcacacgtctatgtgcatgtgcacacacactcaaacatgtacacacacgtgccctccccacctcactagactctccgggagatggggcaggactgggagagcccacgattggtgatttgggtgtgttgggatgaggcggagtgcctgtgggatttgtcccggtcagagcctcagggggctggggtctcagggcactcagcttcccaggcaataacagccgtggggtaataaatggtctctgcacacctgcaaaaaaaaaaaaaaaaaaaaaaaaaaaaaaaaaaaaaaaaaaaaaaaaaaaaaaaa

SEQ ID NO: 928 - DNA, 2684 bp, Homo sapiens
acgccgtagggggcgggccgttcgggcttggtttcctgggcgaccaccgctggctagtccgttagaggcgtgcgggcttcggaggcgtgcgggcttcgggtgccatggggactcctcccggcctgcagaccgactgcgaggcgctgctcagccgcttccaggagacggacagtgtacgcttcgaggacttcacggagctctggagaaacatgaagttcgggactatcttctgtggcagaatgagaaatttagaaaagaacatgtttacaaaagaagctttagctttggcttggcgatattttttacctccatacaccttccagatcagagttggtgctttgtatctgctatatggattatataatacccaactgtgtcaaccaaaacaaaagatcagagttgccctgaaggattgggatgaagttttaaaatttcagcaagatttagtaaatgcacagcattttgatgcagcttatatttttaggaagctacgactagacagagcatttcactttacagcaatgcccaaattgctgtcatataggatgaagaaaaaaattcaccgagctgaagttacagaagaatttaaggacccaagtgatcgtgtgatgaaacttatcacttctgatgtattagaggaaatgctgaatgttcatgatcattatcagaacatgaaacatgtaatttcagttgataagtccaagccagataaagccctcagcttgataaaggatgatttttttgacaatattaagaacatagttttggagcatcagcagtggcacaaagacagaaagaatccatccttaaagtcaaaaactaatgatggagaagaaaaaatggaaggaaattcacaagaaacggagagatgtgaaagggcagaatcattagcgaaaataaaatcaaaggccttttcagttgtcatacaggcatccaaatcaagaaggcatcgtcaagtcaaactcgactcttctgactctgattctgcatctggtcaagggcaagtcaaagcaactaggaaaaaagagaagaaagaaagattgaaaccagcaggaaggaagatgtctctcagaaacaaaggcaatgtgcagaatatacacaaggaagataaacctttaagtctgagtatgcctgtaattacagaagaagaagagaatgaaagtttgagtggaacagagttcactgcatccaagaagaggagaaaacactgaacaaagagcctggtgtagtttttaattttgagttttctgacagaagaaaagattgatattttgtgtattgaacaggaagactgccagtattaaaaaaatccttctgggaatctgtaggttatttcttggaaattgcaatacgtagttctagaataaaagtacaaaaaattagaataagaattctttaacattttctttaatgatttgcataaatggagataaaacttgtatttagtatgtaatagaaaaaattctgttattcgcagattgttactatttcctataaggttttgtgatactatactgtcctaatacagtctggtaatactattctattttatttaaaatattttttattgaaatattaatgtttattacatgcaaataactattttgtatctacagtcggataatggattttttattttgtatatttattctattttgtatattgttaagtgcaataaagtttttgccttgctttattttttaatacataaaacttacattctcataacgtgattgataacttaggaagttcacaatgtattttctacttctgcaattaaatattctttagtgcttgtttattattactaaatactaattaagtactaacaagtacttaaatactaatgtattaagtatttaagtactttctaataaaatctttaacaataataatgtaaatttcagaatgtgtctctggtacagaatagttgatattaacagaaaaaaaaaaatctgtagcttcatgaatatgccactctgttaatttcttgttccagacattttaatagagattgcttgagccatgttgtttgaattgctgccaatagcagaccatatccctatcatgttgttggctcaactgttttttttttttccctaatagagatggagtatcgctatgttgctcaggctggtcttgaactcctgggctcaagctatcctcctgcctcagcctcccaaagtactgggattataggtgtgagctactgtacccagccttaacctgtttcacagttgattatacttcatgctgttttccagcatggtattattaagggatttaaagtttgggttgcatgcctgtaatcccagcattttgggaggccgaggtgggcggatcacgaggtcaggagatcgagaccatcgtgactaacacagtgaaaccccgtctctaataaaaatacgaaaaattagccaggcgtggtggcgggcgcctgtaatcccagctactcgggaagctgaggcaggagaatggtgtgaacccagtgagccgagatcgtgccactgcactccagcctgggcaacagagtgagacttcgtctcaaaaaaaaaaaaaagtttgggttgaagatcaaattcgtgatatctctatatctaatctttaaaaatcagaatgctaatgctgacgcaaataaaattttcatttattagcaaaaaaaaaaaaaaaaaaaaaaaaaaaaa

SEQ ID NO: 929 - DNA, 1561 bp, Homo sapiens
cccgtagctccgcccatcggagaagcgaccttacagcgcctgcctctttctgagcggcatgaagccacctcccaggcggcgagcggccccggcgcgctatctgggcgaggtgaccggtcccgcgacctggagcgctcgcgagaagcggcagctagtgcgactcctgcaggcgcggcagggccagccggagccggacgccaccgagctggcccgggagctgcggggccggagcgaggctgagatccgggtcttcctccagcagctcaagggccgcgtagcccgggaggccattcagaaagtgcatccgggtggccttcagggaccaaggcgccgggaggcacagcccccagcccccatagaggtctggacggatctggctgagaagataacagggccactggaagaagccctggcagtggctttctcgcaggtgctcaccatcgcggccacggaaccggtcaccctcctgcactccaagccccccaagcccacgcaggcccgtggaaagcctttgctcctgagcgcccctggaggacaggaagaccccgcccctgaaatacctagctctgcccctgctgcacctagctccgcacccaggactcctgaccctgcccctgagaaaccttctgagtcgtcggctggtccctccactgaagaagactttgctgtggactttgagaagatctacaagtacttgtcctctgtctcccgaagtggccgcagccccgagctctcagcagctgagtccgctgtggtcctcgacctgctcatgtcacttccagaggagctgccactcctgccctgcacagccctggttgagcatatgacggagacgtacctacgcctgacagccccccagcccattcccgctggagggagcctggggcctgcagcagaaggggatggggctggctccaaggcaccagaggagacccccccagccaccgagaaggccgagcacagcgaactgaaatcgccttggcaagcagctgggatctgtcccctgaacccgttcctggtgcccctggagcttctgggtcgggcagccacccctgccaggtgaggggcatggcgggcaggaggccacaccaggccccccgccctgcccctcggttctgctcggctggccctggctctttctgaggatcccgtcatgggggaaggtccttgagatgatgctcagctgtggggcgggcctctaagatgccccatactttgggggtctcagaaatggaacccccgttgtacaggggttgggtgggggttgcaggactccactcacaagcctcctgatgtcaaggacaggcggacagggctggcctcccccagtccccaagccccactgtgccttgttgtctgctggggggccatagctggcactgcccaccgtaaaggccctcgcacattttcccccttcctgtacacctcggggccagcatcctcaccttcttcaactgaccagtcgtggttactccctgctgccaggtccttccccttcccgggggtattctgtgaccatgaataaagttatcattctctttctctttcacaaaaaaaaaaa

SEQ ID NO: 930 - DNA, 2533 bp, Homo sapiens
gtggggcgaacatggctgaaggaagccgaggtggccctacgtgtagcggggtgggtggcaggcaggacccagtctccggcagtggcggctgcaactttccagagtatgagcttcccgagctaaatacgcgcgctttccatgtgggcgcctttggggagctgtggcggggccgtctgcgcggggccggggacttgtcgctgagggagccgccggcatccgctctgcctgggagccaggcagctgactccgaccgggaggatgccgcggtggccagggatctggactgcagcctggaggcggcggctgagctgagggcggtgtgcggccttgataaactgaaatgccttgaggacggtgaggatccagaagtcattccggagaatactgacctggtgactttgggggttagaaaaaggttcttggaacatcgggaagaaaccattacaatagatcgagcctgcagacaagaaacattcgtttatgagatggagtcacatgccataggaaaaaagcctgaaaattcagcagacatgattgaagaaggggagcttatcctatctgtgaatatcttgtaccctgttatatttcataagcacaaagaacacaaaccataccaaacaatgctggtgttgggcagtcaaaaactcacacaactgagggattcaattcgatgtgtcagtgacctccagattggtggtgaattcagcaacactcctgaccaagcccctgagcacatcagcaaagacctatacaaatcagccttcttttattttgaaggaacattttataatgataaaagatacccagaatgcagagatttgagcagaactatcattgagtggtcagagtcccatgatagaggctatggaaagtttcagactgctagaatggaagatttcaccttcaatgacttgtgtattaaactgggttttccttacttatactgtcatcagggagactgtgaacatgtcattgtcattactgacataaggcttgtgcatcatgatgactgcttggataggacattgtatcccctccttatcaagaagcattggctatggaccagaaaatgttttgtttgtaaaatgtatacagccagatgggtgacgaacaatgacagttttgcaccagaggacccatgcttcttttgtgatgtttgcttccgaatgctgcactatgattcagaaggcaacaaactgggggaattccttgcttatccttatgttgatcctggaacctttaattaagaatagctacactcacaaaaataccccctcatgaaataactgttctcttggatggttaccttatttctaagaaacgccactgaggaacaggatccactttgaacagtccgctaaagctatcaaaaaaaagtccaaatcacagattttcttataatgatagtatttaaatgtttataacatagtttaattttatatttattccagatagtatttaatttagtgctttttacccattttgagttgagttgtagtactttatatattctgactttaaatcctttgctcagacacacatattctttctcccaatccatgccttccctattcattctctgtccagagttttttgctaaagatagaattattaatgatacatcaagtagtggaagtgttttgaaaattctttgaagaatgtgagagctacaccttctaccatgaggcttccaaggttgtatttaaatttgactgaatatctggatggctaagaacagacatttatcttacacatggaaaactgacgaaacctataagcctatgtgtttgacagtgaagtatgttttatggacttaaatgccacaaacagttaagtccattggcttggagatgacaagcacgagtttctggtatgtctagtgttctcattcactgattcagtcagtacacagataatcactatagagaacttaagaggctggcttatgttatacctaaatttttactttctgtatacaacaatgctaaaattgagcagattgataactgccagcaaaccatagatttaagataaatgaatgatttacccaacccgaaattccatgggctaaattttgatcctttattttcaatacgcgttccttataggtcttacatcgatatcgaaggatattttatcttattcattcatttcatactctcaaaacaccaaacttcaaaaagttaattattgtcataatgcattattccatgtgtggtgtcaatacattttagcggacaaagaagaaacatgccagttaaaacatttctgctactggattctttattaattatttgagaacgttattttgctagttcttaaggttaagtttttcatcaaagactcaggtacctattattgttccctggtgaaactgaggagaaaagttaatcaaccaggttactcccacagtttgcccgtgtgttatgtatcagttatacaggtatcccaccaagttcaagtcaaaagaaattcctaactttgtatatttctggagctatataaacccctgatttaagaaaaaaaaaaaaaa

SEQ ID NO: 931 - DNA, 4661 bp, Homo sapiens
gcgggagtcatggatgtagatgctgaaagagagaagataacacaggagatcaaggagctggaaaggattttggatcccggctcctcgggctcccacgtggagatctcagaatcaagtctcgagtcagattctgaagcagattcactgccttctgaggacttggatcctgccgatcccccgatctcggaagaagaaaggtggggcgaagccagcaatgacgaggacgatcccaaggataaaaccctccctgaagacccagaaacctgcctgcagctgaacatggtctaccaggaggtcatccaggagaagctggctgaggccaacctgctgctggcccagaaccgggagcagcaggaggaactcatgagggatctggctgggtccaaaggcaccaaggtgaaagatggcaaaagcctgcccccaagcacatacatggggcacttcatgaagccgtatttcaaggacaaggtcacgggcgtggggccacctgccaacgaggacacacgagagaaggctgcccaggggatcaaggctttcgaggagctccttgtgaccaaatggaaaaactgggaaaaggccttgctccgaaagtcagtggtgagtgaccgcctgcagcgattgcttcagcccaagttactgaagctcgagtacttgcaccagaagcagagcaaagtctccagtgagctggagaggcaagccctggagaagcagggcagggaagccgagaaggagatccaggacatcaaccagcttccagaagaggccttgctgggaaacaggctggacagccacgactgggagaagatttccaatattaactttgaaggcagccgcagtgcagaggagatccggaagttctggcagaactcggagcaccccagcatcaacaagcaggagtggagcagggaggaggaggagcggctgcaggcgatcgcggctgcacacggccacctggagtggcagaagattgcagaggagctggggaccagccgcagcgccttccagtgcctgcagaaattccagcagcacaacaaagctctgaaacgcaaggagtggacagaggaggaggaccgcatgctcacgcagctggtgcaggagatgcgcgtcggcagccacatcccctaccgcagaattgtctactatatggaagggagagactccatgcagctgatctaccgatggaccaagagcttggatcctggtctgaagaagggttactgggccccggaggaagatgctaagttgcttcaagctgttgccaaatacggggagcaggattggtttaaaatccgggaagaggtgccaggtaggagcgatgcccagtgccgagatcggtatctcaggagattacatttcagcttgaaaaagggtcggtggaatttaaaagaagaggaacagttaattgaattaatagaaaaatatggtgtcggtcactgggcaaaaatagcttctgagctgccccatcggtctggctcccagtgtctgagcaagtggaagatcatgatggggaagaagcagggtctccggaggcggcggcggagggcccgtcacagcgtccggtggagctctaccagcagcagcggcagcagcagtggcagcagtggagggagcagcagcagcagcagcagcagcagcgaggaggacgagccagagcaggcgcaggccggggagggtgacagagcgctgctgtccccacagtacatggtcccggacatggacctgtgggttcctgccaggcagagcaccagccagccatggagaggaggggcaggggcctggctgggaggccccgctgcctccctcagccctcccaaggggtccagtgccagccagggcggcagcaaggaagcttccaccacagccgcggctcctggagaggagacgagtccggtgcaggtccctgccagggcccacggccctgtcccgaggtctgcccaggcctcccactcagcagacactcgcccggcgggcgcagagaagcaggccctggagggtgggaggcgtctgctgacagtgcctgtggagaccgtgctgagggtgctcagggccaacacggctgctcggagctgcacacagaaagagcagctgaggcagccacccctgcccacctcatccccaggggtcagctctggtgacagcgtggcccgatcccatgtgcagtggctacggcacagagccacccagagtgggcagcggcgctggagacacgctctgcaccggaggctcctgaaccgcaggctgctgctggctgtgaccccttgggtaggggacgttgtcgtgccctgcacacaggcttcccagagacccgccgtagtgcagactcaagcggatggcctcagggagcagctgcagcaggcccgcctggccagcacccctgtgtttaccctgtttacccagctgttccacatcgatactgccggctgcttggaggtcgtccgagagaggaaggccctgccacccaggctgccccaggctggtgctcgggacccaccagttcatcttctgcaggcatcctcaagtgcccagagcaccccaggccacctcttcccaaacgtgccggctcaagaagcctcaaagagtgccagccacaaagggagccgaagactggcgtccagccgggtggagcgcaccctaccccaggcgtccctgctggcttcaaccggcccccggcccaagcccaagactgtgtcggagctgcttcaggagaagcggcttcaggaggcccgtgccagggaggccacccggggcccggtggtgctcccgtcccagctgctggtctcctcgtctgtgatcctccagccccctctaccacacaccccacacggccgcccagccccgggtcccaccgtcttaaatgtaccgctctctgggcctggggcccccgcggcagccaaacctggcacttctggctcctggcaggaggctgggacttcagccaaggacaagagactctccaccatgcaagccctgcccctcgctcctgtcttctcagaggccgagggcacagcccctgctgcttcccaagcccctgccctgggccccggccagatctctgtgagctgccccgagagtggtctcggacagtctcaggcccccgctgcatcccggaagcagggcctgcctgaggcgccaccctttctccccgcagcccccagccccaccccactgcccgtccagcccctcagcctgacgcacataggagggccacatgtggcgaccagtgtccccctgcctgtcacctgggtgctcacagcccaggggcttctccctgttcctgtaccagctgtggtgagccttcccaggccagcagggacccctggccccgcagggctgctggccactctgctgcctcccctgactgagactcgggcggcccagggccccagggccccagcgttgagcagctcttggcagcccccagccaatatgaacagggaaccggagccttcctgcaggacagacaccccagctcctcccacacacgccctctcccaaagtcctgcagaagcggatggcagtgtggcctttgtccctggagaggcccaggtggccagggagatacctgagcccaggacgtcctcccacgctgaccctcctgaagcagaacccccttggtccgggaggctgccagccttcggtggtgtcatcccagcaactgagccaagggggacgccggggtccccctcagggacacaggagcccagggggcctctgggcctggagaagctgcccctgcgccagcctgggcctgagaagggggccctggacctggagaagccgcccctaccccagcctgggcctgagaagggggccctggacctgggcctgctgtcccaggagggcgaggcggccacacagcagtggctggggggccagcggggggtgcgtgtgcctcttctgggcagcagactgccctatcagcccccagccctgtgcagcctgcgagctctgtccggtctcctactccacaagaaggccctggagcacaaggccacctccctggtggtggggggcgaggctgagcggccggccggagcactgcaagcctcactggggctggtgcgggggcagctccaggacaacccggcctacctcctgttgcgggcgcggttcctggcagccttcaccctccctgcgctcctggccaccctggccccccaaggcgtccgcaccaccctctcagtaccttcgagggtgggctctgagagtgaggatgaagacctcctgagtgagctggaacttgcagacagggacgggcagccgggctgcacgacagccacatgccccattcagggagccccagactctggtaaatgctctgcttcctcctgcctggatacttctaatgaccctgacgacctggacgtgctcagaacccggcatgccaggcacacccggaagcggaggcggctggtgtgagcagcaggacaagcactttctcagaagcccgtggccctgctgacgagagacagcccacccccagcctgcaagagaggcagccagaggccaggtatctgctggccgctgactgaccaggtccgcagtgaacagaggcgggcctgccgactgactgtgtggcatggagcatggctgttccccaagtgcacacctgaacacttggaggaataaagttctgtttttaattgtggaaaaaaaaaaaa

SEQ ID NO: 932 - DNA, 785 bp, Homo sapiens
gggagtcggcggcgatggcgtcatcaccgagtgccgggccgacagcagcccggaggttggctatgtgaccaggcaacatgctgagccggcttcaggaactgcgcaaggaggaggagacgctgctgcggttgaaggcagccctgcacgaccagctgaaccgcctcaaggttgaagaattagccctccaatcaatgatcagttctagaagaggggatgagatgctgtcttctcacactgtacctgaacagtcacatgatatgttggtgcatgtagacaatgaagcatcaatcaaccaaacaaccctggagctgagcacaaagagtcatgtgacggaagaggaggaggaggaagaggaagaagaatcagattcctaaaggagggggaaagccaggctggtgaaatgcacatctgaacagagacaggcatgggaaggaggcccaaaagcgacatggcaaaccaccgggcaggggactcgctctttgttgcttcccaaacacttagacgccagcagcatgggttggtgtgctgggctggttaaggccgatggtggagcagagccaacctgcaaaatccacttcctcagcatcagatctcttgataaaagcatgaacctgcatgtaaggaaacgagaggacgtggtgttaaaaagaaacaaaaaaacaaaacccaccaggaaggaaaatccaagagtttcaggtctagagcttgtgctgcacttggaaagagcacctggcacctgcccctgagcaacagtggggccagctgcaggcccaaagacctgctcc

SEQ ID NO: 933 - DNA, 992 bp, Homo sapiens
ggggcagacgtgggacgggaaggacggctgccgggactggcgcgcggggacactgggccgacgcgtggagtagcggggagagcgggaagcctgagggggcggggccggcgcgaggccgtgggtgcggcacgaggatgccggcggcgggacagcgcccgtaggcagccccacgggcagggcgcgcgggcggggcggggcgggccgggccagaggagcgcccggcatgtcgcaagggctcccggccgccggcagcgtcctgcagaggagcgtcgcggcgcccgggaaccagccgcagccgcagccgcagcagcagagccctgaggatgatgacaggaaggtccgaaggagagaaaaaaaccgagttgctgctcagagaagtcggaagaagcagacccagaaggctgacaagctccatgaggaatatgagagcctggagcaagaaaacaccatgctgcggagagagatcgggaagctgacagaggagctgaagcacctgacagaggcactgaaggagcacgagaagatgtgcccgctgctgctctgccctatgaactttgtgccagtgcctccccggccggaccctgtggccggctgcttgccccgatgaagccggggacactcctctgcccagcaaggagccttggtcattttcatacctgggaggaaggcttttccttcacaattgtatacagggggcacctgtggccaggcctcctcctgggagctccaggaccagccagctgtgttccctgcagactgggctcagcccgacatccaacaggcgccaaactcacagagcccttgtgcagatccagcatggaggccaccctcaggagtgacttctcatccaccctggcagctagtaggttctgctgttatgcagagccatttcctctagaatttggataataaagatgcttattgtctctcccttctccagttctgggaatttacaggcacaatacacttccttttcctggaaaaaaaaaaaa

SEQ ID NO: 934 - DNA, 2146 bp, Homo sapiens
cgctcgcgctggaagaagcggaagaagatggcgctcaccagctttttacctgcacctactcagctatctcaggaccagcttgaggctgaagaaaaggcaagatcccagagatcacggcagacctcactggtctcctcccgaagagaacctcccccgtacggataccggaaaggctggatacctcggttattagaggattttggagatggaggtgcttttccagagatccatgtggcccagtatccactggatatgggacgaaagaaaaaaatgtcgaatgcgctggccattcaggtggattctgaaggaaaaattaaatatgatgcaattgctcgacaaggacagtcaaaagacaaggtcatttatagcaaatacactgacctggttccaaaggaggttatgaatgcagatgatccagacctgcaaaggcccgatgaagaagctattaaagagataacagaaaagacaagagtagccttagaaaaatctgtatcacagaaggtcgccgcagccatgccagttcgagcagctgacaaattggctcctgctcagtatatccgatacacaccatctcagcaaggagtggcattcaactctggagctaaacagagggttattcggatggtagaaatgcagaaagatccaatggagcctccaaggttcaagattaataagaaaattccccggggaccaccttctcctcctgcgcctgtcatgcattctcctagccgaaagatgactgtaaaggaacaacaagagtggaagattcctccttgtatttctaactggaaaaatgcaaagggttatacaattccattagacaaacgtctggctgctgatggaagaggactacagacagtacacataaatgaaaatttcgccaaattggcagaagccctctacattgctgatcggaaggctcgtgaagctgtggaaatgcgtgcccaagtagagagaaaaatggctcagaaagaaaaggaaaaacatgaagagaaacttagagaaatggcccagaaagccagggagagaagagctgggatcaaaactcatgtggaaaaagaggatggggaggcacgtgagagggatgaaatccggcatgacaggcgaaaagagagacagcatgaccggaatctttccagggcagctcctgataagaggtcgaaacttcagagaaatgaaaatcgggatatcagtgaagttattgctctcggtgttcctaatcctcggacttccaatgaagttcagtatgaccaaaggctcttcaaccaatccaagggtatggacagtggatttgcaggtggagaagatgaaatttataatgtttatgatcaagcctggagaggtggtaaagatatggcccagagtatttataggcccagtaaaaatctggacaaggacatgtatggtgatgacctagaagccagaataaagaccaacagatttgttcccgacaaggagttttctggttcagaccgtagacagagaggccgagaaggaccagtgcagtttgaggaagatccttttggtttggacaagtttttggaagaagccaaacagcatggtggctctaaaagaccctcagatagcagccgccccaaggaacacgagcatgaaggcaagaagaggaggaaggaataggcacaggtctctccaaagtgaatgaactcttacccataaccctaatgatgcaagtcatatgggggaacactttgtaaatggtcaggataaaaaccaaatctgggtgccagatcccagcactactttttattactggagaaatgggggggatagaaaattctactttgaattatttagttttttttaaagagtgggttgtgtttgtgcttctcccacctttcagcatttatagaacatgctgccccacatacaaagtcaagaccacttacttttatgtgacactagtagtttggggttaatgttttgtgtaagaacagctgcatatgagtaaagttaccccaaccacagtgaggaggaagatgttcacatactggaactgtcctgccaaataaattttgcccctattgtgctctgttttaatttggagtgggcaaagtaacctcttgcttggtgcaactatttgtttcaaataaaaacatttagacaaaaaaaaaaaaaaaaaaaaaaa

SEQ ID NO: 935 - DNA, 4759 bp, Homo sapiens
gccccgcggctgaggagcgggaggccgtccgggcagcgcggccggcggcgagaggggccccgccgctctccggaggcagaagttgtggatcggccggcgggggcgagcgggcccgggggccggggccgcgctgcccgggccgcgaggacgaggcggcgccgccgggctgtggaggcagcagcccagacgcggcacagagagggcctgggagcttgctgcagcttcagacagggagccaggatgggaaccacggactgacctgacctgcgtcctcggggccactgcactgggtgattcacgtgtgcccaggccctgaggtgggccggacctgggagtggcagccacacccactcgcccgggtctatggccacggtcggagagtggtcctgtgtgcgctgcaccttcctgaacccggccggccagcgccagtgctccatctgcgaggctccccggcacaagcccgacctcaaccacatcctgcggctcagcgtggaggagcagaaatggccctgcgcccgctgcaccttccgcaacttcctgggcaaggaggcctgcgaggtgtgcggcttcaccccggagcctgcgcctggggctgccttcctgccagtcctcaacggggtcctccccaagccacccgccatcctgggggagcccaagggcagctgccaggaggaagcaggtccagtgaggactgcggggctggtggccacggagcccgccagggggcagtgcgaggacaaggacgaggaggagaaggaggagcaggaggaggaggagggagcggcggagcccagagggggctgggcgtgtccgcgttgcacgctgcacaacacgcccgtggccagctcctgctccgtctgcgggggcccacgcaggctctcgctgccacggatccctcctgaggccctggtggtcccggaagtggtggccccggccggcttccacgtcgtgcctgccgcgcctccacctggcctccccggggaaggtgccgaggccaaccccccagccaccagccagggcccagctgccgaaccagagccgcccagggtcccgcccttcagccccttctcgtccaccctgcagaacaaccccgtgccgcgcagccgacgcgaggttcccccccagctgcagccaccggtgcctgaggctgcccagccgtcaccctctgccggctgcaggggagccccccagggctcgggctgggctggggcctcccgcctagcagagttgctgtctggcaagcggctgagtgtgctggaggaagaggccacggagggtggcaccagccgcgtagaggccggcagctccacctcgggcagtgacatcattgacctggccggagacaccgtgcgttacacgcccgccagcccctccagccccgacttcaccacctggtcatgtgccaagtgcacgctcagaaaccccacagtggcccccaggtgctcggcctgcggctgctccaaactgcacggcttccaggagcatggcgagccccccacccactgccccgactgtggggccgacaagcccagcccctgcggcagaagctgcggacgggtgtcctcggcccagaaggccgcccgcgtcctgcccgagcgcccgggccagtgggcctgccctgcctgtaccctgctcaacgcactgcgggccaagcactgcgccgcctgccacacgcctcagctcctggtggcccagcggcggggggccgcgcccctgaggcgcagggagagcatgcacgtggagcagcggcggcagacagacgagggcgaggccaaggcactctgggagaacatcgtggccttctgccgggagaacaatgtgagcttcgtggatgacagcttccctcccgggcccgagtctgtcggcttccccgcgggtgacagcgtgcagcagcgtgtgaggcagtggctgcgaccccaggagatcaactgctccgtcttcagggaccacagggccacgtggtctgtgttccacacactgcggccctcagacatcctgcaggggctgctggggaactgctggttcctgagcgccctggcggtgctggcggagcggccggacctggtggagcgggtgatggtcacgcgcagcctgtgtgcagagggcgcctaccaggtgcggctgtgcaaggacggcacgtggaccacggtgctggtggacgacatgctgccctgtgatgaggccggctgcctcctcttctcacaggcgcagcggaagcagctgtgggtggccctcatcgagaaggcgctggccaagctgcacggctcctactttgcgctccaggcgggccgcgccatcgaaggcctggccacgctcaccggcgccccctgtgagagcctggcgctgcagctcagctccactaacccccgcgaggagcccgttgacactgacctcatctgggccaaaatgctgagttctaaggaggctgggttcctcatgggtgcctcctgtggcgggggcaacatgaaggtggacgattcggcctacgagagcctgggcctgcgcccccggcatgcctactccatcctggatgtccgagatgtccagggcaccaggcttctgcggctccgaaacccgtggggccgtttctcctggaacggcagctggtccgacgagtggccacactggccggggcacctgcgtggcgagctcatgccgcacggcagcagtgagggtgtcttctggatggagtacggcgactttgtcaggtacttcgactccgtggacatctgtaaggtgcactcggactggcaggaggcgcgggtgcagggctgctttcccagctcggccagcgcgcccgtgggggtaacagcgctcacggtgctggagcgggcctcgctggagttcgcgctcttccaggagggcagcaggcgctcggacgccgtggacagccacctgctggacctgtgcatcctggtgttccgggccacgttcggcagcggcggccacctcagcctgggccgcctcctggcccacagtaagcgcgcggtcaagaagttcgtcagctgcgacgtcatgctggagcctggcgagtacgctgtggtgtgctgcgccttcaaccactgggggccgcccctgccgggcacccctgccccccaggcctccagcccctcggcaggggtcccgagagcctccccagagccgccgggccacgtgctggctgtgtacagctcgaggctggtcatggtggagcccgtggaagcccagccgaccacgctggccgacgccatcatcctgctcaccgagagccgcggagagcggcacgagggccgtgagggcatgacctgctactacctgacacacggttgggcggggctcatcgtggtggtggagaaccgacaccccaaggcctacctgcacgtgcagtgtgactgcaccgacagcttcaacgtggtgtccacacgcggcagcctgcgtacccaggatagcgtgccacccctgcacaggcaggtcctggtgatcttgtcccagctagagggcaacgccggcttctctatcacccaccgcctggcacatcgcaaggcagcccaggccttcctcagtgactggacagcctccaaggggacccacagccccccactcacgccagaggtcgccggtctgcatgggccccgaccgctgtgaccaccatgcctggggcaggggctgtgcacagacggaccccccacccccacacgcactttatgagggagaccccgacagaggacgcttgagccagaatctcaggaccccgcccagggagctgccagcccagggctcagcttcccatgggccccccgcccccctccttcccctccctgaaccccacagtccgcctggccaggcctcctggccgccacgcagaatacctcgaaccaggcgggctgtgaaccagccccgctcacctgccagccccaacacccgacgggggccgaggccaggctgcccctccctgtgggctcagggtctcctgcgggctaggcagccaggagctctgtccgcaaaaccaaatctgggtgtcagaggccaagaccctggggtgggatcagggaccacccctcacggggcataaggtcagttttcccccagagcccgggtccctgtcccccacagggcaggcggggtccctggagccctggtgtggagcggcgagtcccggggcggtgcctgtctcagaagaaggggcccttggccagccccccagcgacactatgcaaatcctggagtgcccgccaggatcgaagccatgactgggtgcaggcgggcgccaggcccgctgtgggtgggcaccagttctcagcaccgctcactgctgccgggcacactgggaccagcaggctcctcagccaaccctgtccctcggcccggccctgccagagagggaccccagcacatcgtgggcacgggcagggctcagccgctcccacctccccacagaagcccaggagtgtgtggacgtctgagcccagctttctgcgtgccctcctggcccctcactcccggcagcgggccggcctcgcccccactccccctcctaccccggcaggggcttccggggccttttcacctggagaaacattcccactcccctttggcctccctgtactctgagctgtgaatatttttaaccctgtaaatacggccagctcttgtgacacagagactattttatcaattgtcagtcccgttcctttaccataggattctccacagtggcttccgactcaggctccaatggaccaaataaaagcgttttgttttgtaaaaaaaaaaaaaaaaa

SEQ ID NO: 936 - DNA, 2715 bp, Homo sapiens
aggagatgtgccaaactgttaagagtggttatttctgagcagaagaatgtggatgaattccattcttcctatttttcttttcaggtctgtgcggctgctaaagaacgacccagtcaacttgcagaaattctcttacactagtgaggatgaggcctggaagacgtacctagaaaacccgttgacagctgccacaaaggccatgatgagagtcaatggagatgatgacagtgttgcggccttgagcttcctctatgattactacatgggtcccaaggagaagcggatattgtcctccagcactgggggcaggaatgaccaaggaaagaggtactaccatggcatggaatatgagacggacctcactccccttgaaagccccacacacctcatgaaattcctgacagagaacgtgtctggaaccccagagtacccagatttgctcaagaagaataacctgatgagcttggagggggccttgcccacccctggcaaggcagctcccctccctgcaggccccagcaagctggaggccggctctgtggacagctacctgttacccaccactgatatgtatgataatggctccctcaactccttgtttgagagcattcatggggtgccgcccacacagcgctggcagccagacagcaccttcaaagatgacccacaggagtcgatgctcttcccagatatcctgaaaacctccccggaacccccatgtccagaggactaccccagcctcaaaagtgactttgaatacaccctgggctcccccaaagccatccacatcaagtcaggcgagtcacccatggcctacctcaacaaaggccagttctaccccgtcaccctgcggaccccagcaggtggcaaaggccttgccttgtcctccaacaaagtcaagagtgtggtgatggttgtcttcgacaatgagaaggtcccagtagagcagctgcgcttctggaagcactggcattcccggcaacccactgccaagcagcgggtcattgacgtggctgactgcaaagaaaacttcaacactgtggagcacattgaggaggtggcctataatgcactgtcctttgtgtggaacgtgaatgaagaggccaaggtgttcatcggcgtaaactgtctgagcacagacttttcctcacaaaagggggtgaagggtgtccccctgaacctgcagattgacacctatgactgtggcttgggcactgagcgcctggtacaccgtgctgtctgccagatcaagatcttctgtgacaagggagctgagaggaagatgcgcgatgacgagcggaagcagttccggaggaaggtcaagtgccctgactccagcaacagtggcgtcaagggctgcctgctgtcgggcttcaggggcaatgagacgacctaccttcggccagagactgacctggagacgccacccgtgctgttcatccccaatgtgcacttctccagcctgcagcgctctggaggggcagccccctcggcaggacccagcagctccaacaggctgcctctgaagcgtacctgctcgcccttcactgaggagtttgagcctctgccctccaagcaggccaaggaaggcgaccttcagagagttctgctgtatgtgcggagggagactgaggaggtgtttgacgcgctcatgttgaagaccccagacctgaaggggctgaggaatgcgatctctgagaagtatgggttccctgaagagaacatttacaaagtctacaagaaatgcaagcgaggaatcttagtcaacatggacaacaacatcattcagcattacagcaaccacgtcgccttcctgctggacatgggggagctggacggcaaaattcagatcatccttaaggagctgtaaggcctctcgagcatccaaaccctcacgacctgcaaggggccagcagggacgtggccccacgccacacacaacctctccacatgcctcagcgctgttacttgaatgccttccctgagggaagaggcccttgagtcacagacccacagacgtcagggccagggagagacctagggggtcccctggcctggatccccatggtatgcttgaatctgctccctgaacttcctgccagtgcctccccgtaccccaaaacaatgtcaccatggttaccacctacccagaagactgttccctcctcccaagacccttgtctgcagtggtgctcctgcaggctgcccgttaagatggtggcggcacacgctccctcccgcagcaccacgccagctggtgcggcccccactctctgtcttccttcaacttcagacaaaggatttctcaacctttggtcagttaacttgaaaactcttgattttcagtgcaaatgacttttaaaagacactatattggagtctctttctcagacttcctcagcgcaggatgtaaatagcactaacgatcgactggaacaaagtgaccgctgtgtaaaactactgccttgccactcactgttgtatacatttcttatttacgattttcatttgttatatatatatataaatatactgtatatatatgcaacattttatatttttcatggatatgtttttatcatttcaaaaaatgtgtatttcacatttcttggactttttttagctgttattcagtgatgcattttgtatactcacgtggtatttagtaataaaaatctatctatgtattacgtcacattaaaaaaaaaaaaaaaa

SEQ ID NO: 937 - DNA, 4108 bp, Homo sapiens
ccggccgtctatgctccaggccctctcctcgcggtgccggtgaacccgccagccgccccgatgtacagcatgatgatggagaccgacctgcactcgcccggcggcgcccaggcccccacgaacctctcgggccccgccggggcgggcggcggcgggggcggaggcgggggcggcggcggcggcgggggcgccaaggccaaccaggaccgggtcaaacggcccatgaacgccttcatggtgtggtcccgcgggcagcggcgcaagatggcccaggagaaccccaagatgcacaactcggagatcagcaagcgcctgggggccgagtggaaggtcatgtccgaggccgagaagcggccgttcatcgacgaggccaagcggctgcgcgcgctgcacatgaaggagcacccggattacaagtaccggccgcgccgcaagaccaagacgctgctcaagaaggacaagtactcgctggccggcgggctcctggcggccggcgcgggtggcggcggcgcggctgtggccatgggcgtgggcgtgggcgtgggcgcggcggccgtgggccagcgcctggagagcccaggcggcgcggcgggcggcggctacgcgcacgtcaacggctgggccaacggcgcctaccccggctcggtggcggcggcggcggcggccgcggccatgatgcaggaggcgcagctggcctacgggcagcacccgggcgcgggcggcgcgcacccgcacgcgcaccccgcgcacccgcacccgcaccacccgcacgcgcacccgcacaacccgcagcccatgcaccgctacgacatgggcgcgctgcagtacagccccatctccaactcgcagggctacatgagcgcgtcgccctcgggctacggcggcctcccctacggcgccgcggccgccgccgccgccgctgcgggcggcgcgcaccagaactcggccgtggcggcggcggcggcggcggcggccgcgtcgtcgggcgccctgggcgcgctgggctctctggtgaagtcggagcccagcggcagcccgcccgccccagcgcactcgcgggcgccgtgccccggggacctgcgcgagatgatcagcatgtacttgcccgccggcgaggggggcgacccggcggcggcagcagcggccgcggcgcagagccggctgcactcgctgccgcagcactaccagggcgcgggcgcgggcgtgaacggcacggtgcccctgacgcacatctagcgccttcgggacgccggggactctgcggcggcgacccacgagctcgcggcccgcgcccggctcccgccccgccccggcgcggcgtggcttttgtacagacgttcccacattcttgtcaaaaggaaaatactggagacgaacgccgggtgacgcgtgtcccccactcaccttccccggagaccctggcgaccgccgggcgctgacaccagacttgggttttagactgaacttcggtgttttcttgagactttttgtacagtatttatcacctacggaggaagcggaaagcgttttctttgctcgaggggacaaaaaagtcaaaacgaggcgagaggcgaagcccacttttgtataccggccggcgcgctcactttcctccgcgttgcttccggacggcgccgaccgccggagcccaagtgacgcggagctcgtcgcatttgttataaatgtagtaaggcaggtccaagcacttacaagttttttgtagttgttaccgctcttttgggttggtttgttaatttatacaaagagattaccaccaccaccccctccttcagacggcggagttatattctgggttttgtaaaactttatgtatctgagcatttccatttttttttttgggttttgtattatttcttgtaaatgcattgtgaaaaattttattttcggcgttgcaatgcggggaggagaagtcagattatgtacatagttttctaaaaagcctttcttctaaaaacgaaaaaagaccccccacccaaaatgtttcgagtcaacaaatttaagagacagagcccattttctccataaatttgtaacatgctatttttatgtgcatgttttatgagttcaaaatgcaatgaggaaatctgacagggaaattatctgtatgaactaaaagtaagggaaccccggggaatgggaggacaggatttttcaaggaacctttttcaatgaaagagaaggaagttaaaacctataggttattttgtagagctgagtgttaatacgggccgagaaataaaagtatcttctgctccggctgtttcactgcggacggctggggctgctgcgcgttaccttgctgcaagcggggcgccttccacctggctgggggtctgcgccacagtttggtccagaggagggaggaggaagggaagaccccagtggtgggaccctggaccaggccatggatgaaggacaaagaccagggcaggtcacgggtttcccaattccccagcaattaagatttcgagcagaatttatctaaatgtgtttcaaggaaacacaatcgctgaaccaaaacgtactgcagccgagccccctccgtccatcctctgcccctccccctggcttctttctcttgggaaaacgggcaaaataattgtgctggattctcacacacacagaaatatcgaccatcaccctcccccgcgtgaactgggatgcaagttgctaaccgatgtgaacgcaaaatgccttgttcattattcctgacgagatcttgaggttgtttgatgctttaaattttttaattatattattttctaggtgtttattggtacattgcagttttttttttgaaatttaaaaatttctgtaaaactttgtcttcaagtaatctgacagcattaaatattgcatttaaaaattatactgtagcaaatacatttaaaaattaatcacaacgttaagatgaaattatatttttggaaaaaaaaaacacttgaagcccagatggaaatacgtttatttcagcagccttaggtttcccctcgctttctcaacacccttccttgtcctggagtatggactgtccgtccaaaagtgagcctatgctataagtttaatgagaaccgaattcagcctgcattcgagaatagctttaagtataatgctgatctgacaattgacgtgtaatttgggaagtcattttgataattttgcttaaaccactcattcgttaaagtgattacaaaaaagttcaagaatgatgtccactgctttctaacaagataataaaccccccccctcttttctttttctttatttttatttcttttagctatttgatcctttctgaagcagttgtttctggaagagtctgtgcgcccatggatggctgagcaccactacgacttagtccgggataagggcctccccagtcctctccgggagatgatttgggaaattttataatgcttgttctgttaactcaccgggaccttgagggtccaatgggaccttgagggttttctctgaaatatacaaacttaaaggactctctctgaggttctttgactgacgtccactctcagtctggcccctgtgctcccctgtgtgtaccctggagtttctgtgtccaattgttggcatctaggtcttggctcaagattaggatgtgggccccactttagaggcacagactatgaaaagctgagttagtgcgcccgggacgccaggcaagcagcttttacagtttggcatcttattgcaggtgcttcgtgcacagtcagctgaaatagccaatgccaggtgctccaaccaccttatttccttgttttgttgattagaacaacacagaaaaaagcaaatataaatttttaatgactccatttaaaaatatcacagggtgggggcaaggaaattagctgagattcatctcaggattgagattctatccccccttccccgcccccagcagtgtcgctccaattcaaattagtggagaaaagattacagtaggccctgagccgactgtgaattcggtgcttggccaaggtaacactcatcgtattcacggagtgaaatactatatgatgatagttattatattatatgacgacttcattcacttcccaaatcacagggt

SEQ ID NO: 938 - DNA, 2882 bp, Homo sapiens
gtccggccagggtggttggtggtaaggattcaggctccgtcctaacgaggccgtggcctgaggctcagggccccccgcccctccctcccagcccaccagcgtcacctcccagccccgagctggaccgcacaccttgggacacggttttccacttcctaaggacgagccccagactggaggagaggtccgaggaggtgggcgttggactctttgcgaggaccccggcggctggcccgggggaggcggccgaggcggcggcggcggcggccgggggcgacatggcggaggagcaggacctatcggaggtggagctgagccccgtgggctcggaggagccccgctgcctgtccccggggagcgcgccctcgctagggcccgacggcggcggcggcggatcgggcctgcgagccagcccggggccaggcgagctgggcaaggtcaagaaggagcagcaggacggcgaggcggacgatgacaagttccccgtgtgcatccgcgaggccgtcagccaggtgctcagcggctacgactggacgctggtgcccatgcccgtgcgcgtcaacggcgccagcaaaagcaagccgcacgtcaagcggcccatgaacgccttcatggtgtgggctcaggcagcgcgcaggaagctcgcggaccagtacccgcacctgcacaacgctgagctcagcaagacgctgggcaagctctggaggctgctgaacgaaagtgacaagcgccccttcatcgaggaggctgagcggctccgtatgcagcacaagaaagaccacccggactacaagtaccagcccaggcggcggaagaacgggaaggccgcccagggcgaggcggagtgccccggtggggaggccgagcaaggtgggaccgccgccatccaggcccactacaagagcgcccacttggaccaccggcacccaggagagggctcccccatgtcagatgggaaccccgagcacccctcaggccagagccatggcccacccacccctccaaccaccccgaagacagagctgcagtcgggcaaggcagacccgaagcgggacgggcgctccatgggggagggcgggaagcctcacatcgacttcggcaacgtggacattggtgagatcagccacgaggtaatgtccaacatggagacctttgatgtggctgagttggaccagtacctgccgcccaatgggcacccaggccatgtgagcagctactcagcagccggctatgggctgggcagtgccctggccgtggccagtggacactccgcctggatctccaagccaccaggcgtggctctgcccacggtctcaccacctggtgtggatgccaaagcccaggtgaagacagagaccgcggggccccaggggcccccacactacaccgaccagccatccacctcacagatcgcctacacctccctcagcctgccccactatggctcagccttcccctccatctcccgcccccagtttgactactctgaccatcagccctcaggaccctattatggccactcgggccaggcctctggcctctactcggccttctcctatatggggccctcgcagcggcccctctacacggccatctctgaccccagcccctcagggccccagtcccacagccccacacactgggagcagccagtatatacgacactgtcccggccctaaagggggccctgtcgccaccaccccccgcccagcccctgcccccagcctgtgtgccctgttccttgcccacctcaggcctggtggtggcagtggaggaggctgaggaggctgaagaggctgacaggtcggggggctttctgtctggctcactgccctgatgacccacccgccccatccaggctccagcagcaaagccccaggagaacaggctggacagaggagaaggaggttgactgttgcacccacactgaaagatgaggggctgcaccttcccccaggaatgaccctctatcccaggacctgagaagggcctgctcaccctcctcggggaggggaagcaccagggttggtggcatcggaggccttaccactcctatgactcctgttttctctctcacagatagtgagggtctgacatgcccatgccacctatgccacagtgcctaagggctaggccacccagagactgtgcccggagctggccgtgtctcccactcaggggctgagagtagctttgaggagcctcattggggagtggggggttcgagggacttagtggagttctcatcccttcaatgccccctccctttctgaaggcaggaaggagttggcacagaggccccctgatccaattctgtgccaataacctcattctttgtctgagaaacagcccccagtcctcctccactacaacctccatgaccttgagacgcatcccaggaggtgacgaggcaggggctccaggaaaggaatcagagacaattcacagagcctccctccctgggctccttgccagctccctcttcccttactaggctctatggcccctgctcagtcagccccactccctgggcttcccagagagtgacagctgctcaggccctaacccttggctccaggagacacagggcccagcacccaggttgctgtcggcaggctgaagacactagaatcctgacctgtacattctgcccttgcctcttaccccttgcctcccagtggtatttgaataaagtatgtagctatatctgcccctattttcctgttctgcagccccccaaatccacatgtaactcattactgtctcctgttatttatctcagtagtcccctctcctagccactctagcccctattaactctgcattaagcattccacataataaaattaaaggttccggttaaaaaaaaaaaaaaaaaaaaa

SEQ ID NO: 939 - DNA, 8737 bp, Homo sapiens
acctccgcacgagacccagcggcccgggttggagcgtccagccctgcagcggatcatggtgcagcaggcggagagcttggaagcggagagcaacctgccccgggaggcgctggacacggaggagggcgaattcatggcttgcagcccggtggccctggacgagagcgacccagactggtgcaagacggcgtcgggccacatcaagcggccgatgaacgcgttcatggtatggtccaagatcgaacgcaggaagatcatggagcagtctccggacatgcacaacgccgagatctccaagaggctgggcaagcgctggaaaatgctgaaggacagcgagaagatcccgttcatccgggaggcggagcggctgcggctcaagcacatggccgactaccccgactacaagtaccggccccggaaaaagcccaaaatggacccctcggccaagcccagcgccagccagagcccagagaagagcgcggccggcggcggcggcgggagcgcgggcggaggcgcgggcggtgccaagacctccaagggctccagcaagaaatgcggcaagctcaaggcccccgcggccgcgggcgccaaggcgggcgcgggcaaggcggcccagtccggggactacgggggcgcgggcgacgactacgtgctgggcagcctgcgcgtgagcggctcgggcggcggcggcgcgggcaagacggtcaagtgcgtgtttctggatgaggacgacgacgacgacgacgacgacgacgagctgcagctgcagatcaaacaggagccggacgaggaggacgaggaaccaccgcaccagcagctcctgcagccgccggggcagcagccgtcgcagctgctgagacgctacaacgtcgccaaagtgcccgccagccctacgctgagcagctcggcggagtcccccgagggagcgagcctctacgacgaggtgcgggccggcgcgacctcgggcgccgggggcggcagccgcctctactacagcttcaagaacatcaccaagcagcacccgccgccgctcgcgcagcccgcgctgtcgcccgcgtcctcgcgctcggtgtccacctcctcgtccagcagcagcggcagcagcagcggcagcagcggcgaggacgccgacgacctgatgttcgacctgagcttgaatttctctcaaagcgcgcacagcgccagcgagcagcagctggggggcggcgcggcggccgggaacctgtccctgtcgctggtggataaggatttggattcgttcagcgagggcagcctgggctcccacttcgagttccccgactactgcacgccggagctgagcgagatgatcgcgggggactggctggaggcgaacttctccgacctggtgttcacatattgaaaggcgcccgctgctcgctctttctctcggagggtgcagagctgggttccttgggaggaagttgtagtggtgatgatgatgatgataatgatgatgatgatggtggtgttgatggtggcggtggtagggtggaggggagagaagaagatgctgatgatattgataagatgtcgtgacgcaaagaaattggaaaacatgatgaaaattttggtggagttaaagtgaaatgagtagtttttaaacatttttcctgtcctttttttgtcccccctcccttcctttatcgtgtctcaaggtagttgcatacctagtctggagttgtgattattttcccaaaaaatgtgtttttgtaattactatttctttttcctgaaattcgtgattgcaacaaaggcagagggggcggggcgggggaggggaggtaggacccgctccggaaggcgctgtttgaagcttgtcggtctttgaagtctggaagacgtctgcagaggacccttttggcagcacaactgttactctagggagttggtggagatatttttttttcttaagagaacttaaagaactggtgatttttttttaacaaaaaaagggaccattgcaacttttgttaatttaattttttttttttttttttttttttttttttttggagggagaaaactgatgtcttctatgcatccgattcttaacaaaactgcagggagcttgaaaaaatgcagactgtacaaacgcttacaaaaaaaaaaactgtgaactgacttaagatcagagtttacttttcagatcaaattgtttatggttttacaaatgtgatttctacttgccaactttttttttgtaacttgttcccttatacctccttgattgaataccagacagcctagacctcagtacaaaaggtattgaaacatttttgatacataacagacctcagtcttttttaaaaattaatatattttcaggcgtatttttgtacagtgaaaagggaacattcttgctgtgttttttcagtaagactttcaggcacttcttcccttttgatttcttttttttcctctgttttttagcatgcaagtatgttggtacgttatgtcctggtttaaaaaggattaaaattttaaaataatccttgcatctaaaggccttgtggtttaaaaaaaaaaagcaaacttttttttgtacagctatagtagagatttgttcaatatttgtaggtaaagatttattgaaaatggtgatatagacctcagagctgttatcttagtttaaagattgtatatgtactgtactatagtaggactttatgtatctcatacgctgtgatgtggatggggccccagatggaaggtttgaaactggattctcgatttttagcaaaaaagaaaaaaaaaaggcacatagtttaaaaagtttctcattttgtgcaatataatctaaataaagtacagaccatctgcatattttgtagcaaatggtggcaaagcagactcaatgcactgtcgacatcattgcctgtttttttttttttttttttgtgctggaagtctgtatcttgacaattttaataaatcagctggaactgatagaaactcgcatcgccaatagtctctatggaagtcaaactggaggtcctgttgtcgcagagcattcggtggtgaggctgttgtgtgcgcggatgaggggaggtggcaggagagaattctacatttagggggttaggctgaaaagtgttcaattagcaggctgatttctttttcctcttccgctagttgtgaaagacaggggaagggtgttctttctctctgccctccctttccatctccagctccccatttcctttctcacctcctcctccactccctgcctcttctccccacccatcctggcgggcgggctgcgcggaggctcgggagctggccggggaggggcggatggaggggcctgggttgccagctcccttggtcggggtcctgctcgctggggcttgtgtgttctctgcggcgggccgcgtccccgctgagcctcgcggtgacagccgcctttggcagcgagcgctcggggcacttctatccccgcctctcaaagggtggggacagccgtttccagatttgaattttttctgttctttatttttaacgctgcatcttcgcgtgtgctcagaggtggttgttggcggagaacgccgccgcagtgtttgacctctagcggtgaagggggaaggggaagaggaaaggagagaagtggtcggtgtctgtttccttctgtcccccggggccgtggagctgtcggagggaaggaggacggtgcggggccgcagggggcgcggggcgcggcgggacccaggctacgagcgggagggaggcgggagtcgggggaagacgcggcaggccggccgagggcaccccgaggaacatggcatggcctctgtgcgatccgagtcgcggtctccggggtgcctgggagggccgaaccactggtgagggcgtggggagcagggggtggcagagggcacccgggcggtagtccgggacgcgcaaggcagagccctgacgctccgggtccccgtgcctggctcttcttgcctcgccaccgcgtgctcctgggcgcgccccgccgcgggcccttgaggcgcgcggagacaccagcgctggcttcccgggcccgcgggccggggagggaagcctcggggctgcggggtgagaggaagaaagcaaacccggggagcaggcggctgccgcacccgcgcaccccgggccctcaccacgccctccccgcgcgccggctcaggggctgccccggaatcagctccccggggccgccgcaacgaaggtggatccgcatcttgattgttctccgggagcctcctgggggctccggcggcggcgcgggcgcgacccatcccgctggcgctccccgctcgctgaaccccgtttgcctgtccacaccccctcgctccccaccatttttcctgaccggcctgtgtccccgagccctcgcggcaggcccgagcaggcgatcgcggccgggcacgcgcgccccgggctcccgccccccttccgagcatccgccgcctcttttctgctgggtctgggaggagggaggctgggaggccgctcggggcccagcgtgccagccccggagttcagcctcccgagctgcggcgcccgcagcggaggaggttttcagtggctgattgaaactcactgcaaaatcaccacgactctttcacctactgagatgattgaccgaggtttggccttccatttttactgagatttggcgagaccgaatggaagcgtccgcacagtaactgcagctgctaggccagaggggccccggcgcccttcccgcctcccctcccgcttgcttttgccttactcgatcttaccaccacccctcccccggccccccgactgagaactcgggcctctcacccgccccccagcctcccgctctgggcgagcctcctccccagcccccacccctgggatgcgaagccagcaagcttttgctgcagatggacaggtttcttttctgtggctttttcctttcgataaaccatcagatttcagtagtacatttgggaaaagaaggggctgatggcgttaaccaggttctcaatatagaactggatttctggagttgtttaccttaccccacaccccctcaacatgtagactaatgcagccattggtggtacatttattttagccacggataattgaaccagcggtttacaattgacacgtgctccgtgctggtgattttatgtggcagccctctgctgcagttccgaaacttgttggcaacgtaaacccattgataggctgatctatgtattttgaaagcctgaaaacttggcatgtcttttctgttttaatcatagatgaatcttggacattttctgtggtgaggtggaaactttaagtaaattagtaaagtaataatttggcttcagaatgggaagagatagtcaagattttttttttttaaagccatgtggcctaacttgatacaaaaataaaagtaattgtttggcaatctaaatttaaaacctgttagaactcaggacaggcgcttcaatgcgctttttaacaatatttaaggctgttttgatgagtgcgttgtgagaatcatcttaatgaattctttattgagtgtctaaaacatagtataatacacatggtattcttgccactggatagtcttcaataaaagtttaattgatttttttttgttggtctcttaagtaagtcttatttttaactaagcattgacagaatatcttaaaatggtaacctgggggtggcgggtgggtgctgtgtgcacggcagcctagccagtggggatcctgctgtttattataagtagttcacagactctgatggcattttggtaagctttccatctttaagaaattgaaccagcattctcttattaattctttaaactgtggaagtaatttccagttcttacactctgatacgcatcccttttatttaaaaaaaaaaaaaatgctaataaaaggcagtgtacttaaactgtgctttgcaaatattgtgtatgttatgaatgactacagacactgggcaaattatttgtagaatgattatcctttagctagagaaagaaatcattacaactcttttgggcagagatgtttctttttaatgttaatcaaggggaagtgatttaaatatgcataaatgtagcagtcagggtgatttagttgcttttttcatgaaagaaaaagactcaaaagacaagacttatttttctcttctgggacttgaaatcataatcatctgatattagtacagtacaagaaatttacatttgttttttacttcagaatttaagtgacttttgcccaaggaatttgagaaataaggcaaataagttgctctattttaaagtagtcattcaatataaatatattatatcaatcttaacttttttattctctgatatgattaataatatgtatattcttacttttcttctaatgggcatatgtatccttgtggacactttgagagaggttttcttggactctcccatttatagaatctttatactcttttactgtgtggttccctgcttttaacagatttctgaggcaaatatatttgtgcttttttcttatgtaggaagaccagcgaaaatagtttactgagttgtcaattttatcagtagataagaaactttctttattacagtttcagggaagattttttcaggatatttctcagttattctaagggccaaattttgtaaaatttccattaggaatgtcagtttcaaataccctttgtatagcctaagcctgtgaggataacaagaatgagccttacctatcctaacacagggatttacaagttcccaaagtaaccgtctccatgtaactcttgacatacttttctgagatttggcttatttttattattggttatttctcactgttcattctatttgatttattctacaacatccccttttatttaatgatctggaaaattctgctctttgataacaactcaggatttttttgttcagttttggtttttgccccttcctgtggagcctacattttcaaccacaataaagatgaaacaaaatttatgaaactgagctctcttccattttacttactgctggcttttttttttttttttttccttgattcctaccataccttcgtttttttcattgtacttttttaacactacctatatccattagctgcctaattagttttatctgttccatgtggatgcagtgagtttataagagaatttcacaaacaagtagttttttagtgaacttaaaataaacagaattttaaaggagacctatttttatactcaataaaagcacaaaagtgcagaaagtataaaacggcttacaaagggagacacaagctcataatgttccatgtataaaagtaataactttattgggtagagatattcttacaagatctagcacctctgccagtgcacagataggactgttttaaatgatttgggaacttttggttgcctgcagttgtgaacagagaacttctctacagagaaacaaaccactaaaagcaatatgaccgagttgagatgtggtttccaatgagcaattggtgaatttaagcaacctggatgtgcatatgtggaggctcccgtctcactgtttgatcaaacttcttttatgtagtcacgtagacttgattttttctgctgtgaaaatgaaaaaataaagcaatatgacaaaaagtttaaaaatgcataaaaaataggatttcctctaggctcctcgaagagatttttttaatatgatgcttgtcttactttcttagacacgttacatttccccttccaaaaaaaaaaaaaaggacaactggaagtaatttatcatataaagaattttgatcaaatagatattgacaaagggccctctgtcacatttttcttcatccagcttttgttcaaaaacagtatgcctcctcccttgaatcacatagggagaaacgttatactccattctcattaatttcccattttgtctacttttactcttgtacatatgttgtgggtttaagagtcttttgcatttgttctgtgacacctttttttgaattgactgttttaaaacggaggcctattttttccggtttgggactcctagtggttatggcatcccataatgcttcgtgacggccaccaggacagaaccacctgatgttttagagcagttttcagcatgacactgttaacaagtgtgtattttccaaggccacatgaaacttactttcttagccactccaggtttgggagcagaaaagctgaaaaacccttttgtgtagaagtctgagtggtttgtgggggggaccttttttagagtttgcatgccagcgcacggcctattgctgtgaaacagagagaaggtaaagctacctgaggcagtgcgctggaggatgaagtgtttgatagcactaggggggaaagaaaatgcatggcaaagtttcgtcttctcgtagactatctagcatgcagagtgtagtgtgttgaaacggtgtatgacattgctgtatcaaagttgtaaaattaagcattatttattgaaaactatgtatttttttgtaaaaacctgatcacatagagaatatcagtggcttgtgcttgtgcttcgatctaaccagcttcttgacccacccccccttggtatgcagtgttaatgctcagggttgaaaatagtacactccaatgtctcttttgcaagagtttttcacagaggattacatttgttcaaaagactctaataaaattgtgtgatcaatcttcaaaaaaaaaaaaaaaaaaa

SEQ ID NO: 940 - DNA, 1718 bp, Homo sapiens
ccgccatccgccctcccggcctggcctgcccttgcgcccggctccccagtgcccgccgcccgcccgccgcgctcccgcgctccgttccgcccaggccgcgcccagctggaatgcagagatcgccgcccggctacggcgcacaggacgacccgcccgcccgccgcgactgtgcatgggccccgggacacggggccgccgctgacacgcgcggcctcgccgccggccccgccgccctcgccgcgcccgccgcgcccgcctcgccgcccagcccgcagcgcagtcccccgcgcagccccgagccggggcgctatggcctcagcccggccggccgcggggaacgccaggcggcagacgagtcgcgcatccggcggcccatgaacgccttcatggtgtgggcaaaggacgagcgcaagcggctggctcagcagaacccggacctgcacaacgcggtgctcagcaagatgctgggcaaagcgtggaaggagctgaacgcggcggagaagcggcccttcgtggaggaagccgaacggctgcgcgtgcagcacttgcgcgaccaccccaactacaagtaccggccgcgccgcaagaagcaggcgcgcaaggcccggcggctggagcccggcctcctgctcccgggattagcgcccccgcagccaccgcccgagcctttccccgcggcgtctggctcggctcgcgccttccgcgagctgcccccgctgggcgccgagttcgacggcctggggctgcccacgcccgagcgctcgcctctggacggcctggagcccggcgaggctgccttcttcccaccgcccgcggcgcccgaggactgcgcgctgcggcccttccgcgcgccctacgcgcccaccgagttgtcgcgggaccccggcggttgctacggggctcccctggcggaggcgctcaggaccgcgccccccgcggcgccgctcgctggcctgtactacggcaccctgggcacgcccggcccgtaccccggcccgctgtcgccgccgcccgaggccccgccgctggagagcgccgagccgctggggcccgccgccgatctgtgggccgacgtggacctcaccgagttcgaccagtacctcaactgcagccggactcggcccgacgcccccgggctcccgtaccacgtggcactggccaaactgggcccgcgcgccatgtcctgcccagaggagagcagcctgatctccgcgctgtcggacgccagcagcgcggtctattacagcgcgtgcatctccggctaggccgccggcgccgcccgggtccctgcagcgcttcctcccgcagcccccgcgaccgatccgaccgcgtcgctgccgctctgctctctcatacgcgtgtatgtttggttccatgtcacagccccctaggagccagtgatgctcggccttgcgcccgttccacctcccaggccacccttcctgggcttctgggccacctgccctcggggggcccctgcgagggtgcctggagttcccacgtgtcccggggcttttccaggaagcccgagcccaggacctgttggcagagttgccagggttacatttttgaagcacctgctccttttcttgcagtgtattttctacaaccagattgtattaatattttttactttgcccttttaaaaaatatacctaatacaatatatttaatttttaattaaactcttaaacttttcttccaaaaaaaaaaaaaaa

SEQ ID NO: 941 - DNA, 1109 bp, Homo sapiens
  modified_base (829)..(829): a, c, t, g, unknown or other
cggcgggctgggcccgcgcacagcgcccgcatgtacaacatgatggagacggagctgaagccgccgggcccgcagcaaacttcggggggcggcggcggcaactccaccgcggcggcggccggcggcaaccagaaaaacagcccggaccgcgtcaagcggcccatgaatgccttcatggtgtggtcccgcgggcagcggcgcaagatggcccaggagaaccccaagatgcacaactcggagatcagcaagcgcctgggcgccgagtggaaacttttgtcggagacggagaagcggccgttcatcgacgaggctaagcggctgcgagcgctgcacatgaaggagcacccggattataaataccggccccggcggaaaaccaagacgctcatgaagaaggataagtacacgctgcccggcgggctgctggcccccggcggcaatagcatggcgagcggggtcggggtgggcgccggcctgggcgcgggcgtgaaccagcgcatggacagttacgcgcacatgaacggctggagcaacggcagctacagcatgatgcaggaccagctgggctacccgcagcacccgggcctcaatgcgcacggcgcagcgcagatgcagcccatgcaccgctacgacgtgagcgccctgcagtacaactccatgaccagctcgcagacctacatgaacggctcgcccacctacagcatgtcctactcgcagcagggcacccctggcatggctcttggctccatgggttcggtggtcaagtccgaggccagctccagcccccctgtggttacctcttcctcccactccagggcgccctgccagnccggggacctccgggacatgatcagcatgtatctccccggcgccgaggtgccggaacccgccgcccccagcagacttcacatgtcccagcactaccagagcggcccggtgcccggcacggccattaacggcacactgcccctctcacacatgtgagggccggacagcgaactggaggggggagaaattttcaaagaaaaacgagggaaatgggaggggtgcaaaagaggagagtaagaaacagcatggagaaaacccggtacgctccacaaaaaaaaaaa

SEQ ID NO: 942 - DNA, 2537 bp, Homo sapiens
ctccgcgggcagccaacattgatttcctccgggccgagggcgagggcccgggcggcggcgggctgcagccgcggcagggcgagagcatgtccaagccggtggaccacgtcaagcggcccatgaacgccttcatggtgtggtcgcgggctcagcggcgcaagatggcccaggagaaccccaagatgcacaactcggagatcagcaagcgcttgggcgccgagtggaaactgctcacagagtcggagaagcggccgttcatcgacgaggccaagcgtctacgcgccatgcacatgaaggagcaccccgactacaagtaccggccgcggcgcaagcccaagacgctgctcaagaaggacaagttcgccttcccggtgccctacggcctgggcggcgtggcggacgccgagcaccctgcgctcaaggcgggcgccgggctgcacgcgggggcgggcggcggcctggtgcctgagtcgctgctcgccaatcccgagaaggcggccgcggccgccgccgctgccgccgcacgcgtcttcttcccgcagtcggccgctgccgccgccgctgccgccgccgccgccgccgcgggcagcccctactcgctgctcgacctgggctccaaaatggcagagatctcgtcgtcctcgtccggcctcccgtacgcgtcgtcgctgggctacccgaccgcgggcgcgggcgccttccacggcgcggcggcggcggctgcagcggcggccgccgccgccggggggcacacgcactcgcaccccagcccgggcaacccgggctacatgatcccgtgcaactgcagcgcgtggcccagccccgggctgcagccgccgctcgcctacatcctgctgccgggcatgggcaagccccagctggacccctaccccgcggcctacgctgccgcgctatgaccccgcggggccgcctcgcgaggaccggtgtgcacacgtgtacatatgtataggtacgagcgctgcggcctccccgtgcgccctcccgcgaccgggggcccggtttgtatgtacatagaatgtataggtgccaggtagaggcagagaggccaggcggggcaggagtggccaagcgcgcaagggcgcgggcgagcaggcctgtgaattcgcaggatcatttcagacccgcacttcggcagccaactcgaaagcaggcggttgtgtgcggcagcagttggcgtttgctttgcacttcggaacctgttgcgttttgacccacggaggtggaggagtaactttttgacatgttggcctttccagttttgttggaagtttcatggtcggttttgtttttgtttctcattcttcttcctcgcccctcagccccccaacccccaaccccctcccggtccgtgttgcatgcacgctgttcaaatgtgaggtctgaaatggctggcacacgggaaaagctgcttgtgtcattcgtttctgggagtgggatggctctgagcagcctcgcctccctgtttgtactatttgaactttgcagatctctgttctctcaagcagaactcccaaccagatccattcttgaccagtgaccggctcgaatctggccttttgtgtgagatgatcacggtttcttttgtttatcacgccatttgcaaatcagagcaagagctctttctcaagggcaagaaacgcaaacaagaaatatttgtgagatgaaagttgtcaattggattttcttcctaaacaaacaacaacaacaaactactagaagtctccctgagtccactcgcttggatttctgacacagtttacaaaaaaggaaaaaggcactgctcctattttcccttatggctgagttcaccttaagattgtaaatgtgtatatgtcagtgaaaacattgaggcttggaaaatgtgttattttcgttgccctaagtttgagtcgactttagactcaaaaacattttgagcgaatatcaaagttaacttttaaaaattgcgaaactatttcagaatcgcaattttatcgaagattaaatcagacttttttgtctggtaattatatatttattatttagcaaaactgaagaaaaaaagcacagaattgtttcaacagatgtctctcattttcagctagcatttctctcccaagttgagctggtttaatgtgttttggatttccctcctcaattggcttattttttagatcacctgcaattcatttgcaaattgcaataaaacacattttagaaaaaaggaaccttcaattattagctttgtttctttttaaatgtatatattttgactaatgtttgtgaatgaagttggctaacatgtatttagtttcattttggctttatgtaatataaagtttttaaaattttaaatatggttttaacctttatgtgtaaatgattttctagtgtgaccttctaatttaatattagacgtctaaggtatatctgtaaattagaatccgactatcactctgttcattttttttgaacaaagagtttaaataaagcctgaaccagggaaaagaaaaaaaaaaaaaaaaaaaaaaaaaaaa

SEQ ID NO: 943 - DNA, 2074 bp, Homo sapiens
atgcgacctgttcgagagaactcatcaggtgcgagaagcccgcgggttcctgctgatttggcgcggagcattttgataagcctacccttcccgccggactcgctggcccacaggcccccaagctccgctccgacggagtcccagggccttttcaccgtggccgctccagccccgggagcgccttctcctcccgccacgctggcgcaccttcttcccgccccggcaatgtacagccttctggagactgaactcaagaaccccgtagggacacccacacaagcggcgggcaccggcggccccgcagccccgggaggcgcaggcaagagtagtgcgaacgcagccggcggcgcgaactcgggcggcggcagcagcggtggtgcgagcggaggtggcgggggtacagaccaggaccgtgtgaaacggcccatgaacgccttcatggtatggtcccgcgggcagcggcgcaaaatggccctggagaaccccaagatgcacaattctgagatcagcaagcgcttgggcgccgactggaaactgctgaccgacgccgagaagcgaccattcatcgacgaggccaagcgacttcgcgccgtgcacatgaaggagtatccggactacaagtaccgaccgcgccgcaagaccaagacgctgctcaagaaagataagtactccctgcccagcggcctcctgcctcccggtgccgcggccgccgccgccgctgccgcggccgcagccgctgccgccagcagtccggtgggcgtgggccagcgcctggacacgtacacgcacgtgaacggctgggccaacggcgcgtactcgctggtgcaggagcagctgggctacgcgcagcccccgagcatgagcagcccgccgccgccgcccgcgctgccgccgatgcaccgctacgacatggccggcctgcagtacagcccaatgatgccgcccggcgctcagagctacatgaacgtcgctgccgcggccgccgccgcctcgggctacgggggcatggcgccctcagccacagcagccgcggccgccgcctacgggcagcagcccgccaccgccgcggccgcagctgcggccgcagccgccatgagcctgggccccatgggctcggtagtgaagtctgagcccagctcgccgccgcccgccatcgcatcgcactctcagcgcgcgtgcctcggcgacctgcgcgacatgatcagcatgtacctgccacccggcggggacgcggccgacgccgcctctccgctgcccggcggtcgcctgcacggcgtgcaccagcactaccagggcgccgggactgcagtcaacggaacggtgccgctgacccacatctgagcaccggcctgcgctcgtccacccttgttccccacccccacccccactcccgccccgcacccccaagttgggacgccttgtttagctttgcttgcctgggactgttgccttgtaccgatgatggggagggctgaaagttttgctgtagctgtcgggttttgtacaaaagcaaaaataagtcaggagcagcgaaaatgggacttctagagagctctcttgccccacgccgctgctcctttcacctttgtaggctgggaatcgctgtgttatttgcaaagaaaaaacagcccccactcctcctcctgagttccagggttattctgttacatttgaaaatgttgtcttgttagtttgcagttagccaaggagtgaatgggagaaacatagtatcgggtgaggccagctggagaactgcaacgcctacgcccccagtcgtgtcgcgtctgttttcctcgtggttttttggggcgctgaccgctccaagcagcgcggcagctaaagccaatgttaatttatagccaggtgtgcgtgtgtctcccgcctcgccgcccctggccgcgggacagcttctgtccaatcatgttgagttggtgatttctgccgtgatctgtttgatatttcttcgcgctaatgtgttcagatttcgtttgggtagtggggaggggctactttgtttcagggttttcaagcttttactcttaattcctaaatgagatcaataaattttataacc

SEQ ID NO: 944 - DNA, 2787 bp, Homo sapiens
gggggagggatgactaaagacaacggctgtaagagaactccacaagagagtcagaacgaaaatgtgcaacaagtgcggcggctcctaccatggcaggtgattcgaggactcagcacgaggcgagagtagggaccaggaagagccggaaaacccgcctgtgattggccgtccacgggtatcggtcgttgtgattgggtgaggcccagacagacagctgcgttttgaaccgcgtagggttctgggtagcaaaggccttgcaaggctcttaaccgaaagggggagggggaaggtcgccaacaaacggctgagctcacaatcctggccggggcgtccccctcccccatggagagagccagacccgagccgccgcctcagccgcgcccgttgcgtcccgctccgcccccgctgccggtcgagggcacctccttttgggcagcagccatggagccccctccgtcgtctcccacactgagcgcggcagccagtgcgaccttggcctcgtcgtgcggggaggcagtggcgtccggcttacagcccgcggtgcggcggctgctgcaggtgaagccagagcaggtgttgctgctaccacagcctcaggcccagaacgaggaagccgctgcctcgtccgcgcaggcgcggctgttgcagttcaggcccgacctgcggctcctgcagccgccgacagcgtcagacggcgccacctccaggcccgagttgcacccggtgcagcccctggcgctgcatgtcaaggccaagaagcagaagctggggcccagcctggatcagtcagtggggcctcgaggggccgtcgaaaccggtcctagagcctccagggtggtcaagttggaaggccccgggccggccctcggctacttccgaggggacgagaagggcaagctggaggcggaggaggtcatgagagactcgatgcaaggcggggcaggcaaaagcccggcagccatccgagaaggtgtgatcaaaacggaggaacccgagagactcctcgaggactgcaggctcggcgcggagcccgcgtccaatggcctggttcatggcagcgcggaggtcatcttggccccaacgtccggtgcctttgggccgcaccagcaagaccttaggatccctttgacgctccacacggtcccccctggggcccggatccagtttcagggagctccgccttcagagctgataagattgaccaaggtccccctgacaccagtgcctactaaaatgcagtccctactggagccttctgtaaaaattgaaaccaaagatgtcccgctcaccgtgttgccctcagatgcaggcataccagatactcccttcagtaaggacagaaatggtcatgtgaagcgacccatgaacgcatttatggtttgggcaaggatccaccgaccagcactagccaaagctaacccagcagccaacaatgcagaaatcagtgtccagcttgggttagagtggaacaaacttagtgaagaacaaaagaaaccctattacgatgaagcacaaaagattaaggaaaagcacagagaggaatttcctggttgggtttatcagcctcgtccagggaagcgaaaacgattccctctaagtgtttccaatgtattttctggtaccacacagaatatcatctctacaaatcctacaacagtttatccttaccgctcacctacgtactctgtggtaattcccagcctacagaatcccatcactcatccagttgtacatgcccttacagtcggcctccctttggctatggaaattttccgagttcaatgccagaatgccttagttattatgaagacaggtacccaaaacatgagggtatcttttcaactttaaatagagactattcttttagagactactcaagtgaatgcacacacagtgaaaattctcggagttgtgagaacatgaatggaacttcttactataacagtcatagccacagtggggaagaaaacttaaaccctgtgcctcagctggacattggaaccttggagaatgtcttcacagccccgacatcaactccttctagcatccagcaagtcaatgtcaccgacagtgatgaggaggaagaagaaaaagtgctcagggatttataattttaaaacaaatatgcacagaaaataaacatttcttaaaatatattctgggtcagttggtatgagaaaaaaaaaagcctagaattctttgttgaaagttttcagtcgtgatttgaggagttaaaaccaaatgcaatttatgtcttcataaaattttgattagtgaaactagagtctggatgtttcattgtaggaatatttaagttattaagtagtttaattttaatggctgaaatttgcatcaacatgtattattattactttatcctggaacatgcaaaatactgaagcctcacagttgtatgtgaggggaaaggggaaataaatctagcatagtgtgatttttattttatctcaggatacattttttaaatgattttttgtttgctttttatgtaatacttatggatgttgtcaatttttgatgtaacattttgaaagtattttgacaactcctagtgaacttggacttggttgctaaatttaacttacactaataaccaattataagttccaaatgtgttttaatggcacctgggtgattcttcagctaaatttagtcatttctgtttctaaatatttttatcattttaaaatattttttttccatttggcatacatcgttctttgttgtaattaaataaacatagataaaattgttaaaaaaaaaaaaaaa

SEQ ID NO: 945 - DNA, 4912 bp, Homo sapiens
attggggtctgctctaagctgcagcaagagaaactgtgtgtgaggggaagaggcctgtttcgctgtcgggtctctagttcttgcacgctctttaagagtctgcactggaggaactcctgccattaccagctcccttcttgcagaagggagggggaaacatacatttattcatgccagtctgttgcatgcaggctttttggcttcctaccttgcaacaaaataattgcaccaactccttagtgccgattccgcccacagagagtcctggagccacagtcttttttgctttgcattgtaggagagggactaagtgctagagactatgtcgctttcctgagctaccgagagcgctcgtgaactggaatcaactgcttcagggaaaaagaaaaaaaaaaaaaaaagacttgcctgggaggccgcgagaaacttgcattggaagcttcagcaaccagcattcgagaaactcctctctactttagcacggtctccagactcagccgagagacagcaaactgcagcgcggtgagagagcgagagagagggagagagagactctccagcctgggaactataactcctctgcgagaggcggagaactccttccccaaatcttttggggacttttctctctttacccacctccgcccctgcgaggagttgaggggccagttcggccgccgcgcgcgtcttcccgttcggcgtgtgcttggcccggggaaccgggagggcccggcgatcgcgcggcggccgccgcgagggtgtgagcgcgcgtgggcgcccgccgagccgaggccatggtgcagcaaaccaacaatgccgagaacacggaagcgctgctggccggcgagagctcggactcgggcgccggcctcgagctgggaatcgcctcctcccccacgcccggctccaccgcctccacgggcggcaaggccgacgacccgagctggtgcaagaccccgagtgggcacatcaagcgacccatgaacgccttcatggtgtggtcgcagatcgagcggcgcaagatcatggagcagtcgcccgacatgcacaacgccgagatctccaagcggctgggcaaacgctggaagctgctcaaagacagcgacaagatccctttcattcgagaggcggagcggctgcgcctcaagcacatggctgactaccccgactacaagtaccggcccaggaagaaggtgaagtccggcaacgccaactccagctcctcggccgccgcctcctccaagccgggggagaagggagacaaggtcggtggcagtggcgggggcggccatgggggcggcggcggcggcgggagcagcaacgcggggggaggaggcggcggtgcgagtggcggcggcgccaactccaaaccggcgcagaaaaagagctgcggctccaaagtggcgggcggcgcgggcggtggggttagcaaaccgcacgccaagctcatcctggcaggcggcggcggcggcgggaaagcagcggctgccgccgccgcctccttcgccgccgaacaggcgggggccgccgccctgctgcccctgggcgccgccgccgaccaccactcgctgtacaaggcgcggactcccagcgcctcggcctccgcctcctcggcagcctcggcctccgcagcgctcgcggccccgggcaagcacctggcggagaagaaggtgaagcgcgtctacctgttcggcggcctgggcacgtcgtcgtcgcccgtgggcggcgtgggcgcgggagccgaccccagcgaccccctgggcctgtacgaggaggagggcgcgggctgctcgcccgacgcgcccagcctgagcggccgcagcagcgccgcctcgtcccccgccgccggccgctcgcccgccgaccaccgcggctacgccagcctgcgcgccgcctcgcccgccccgtccagcgcgccctcgcacgcgtcctcctcggcctcgtcccactcctcctcttcctcctcctcgggctcctcgtcctccgacgacgagttcgaagacgacctgctcgacctgaaccccagctcaaactttgagagcatgtccctgggcagcttcagttcgtcgtcggcgctcgaccgggacctggattttaacttcgagcccggctccggctcgcacttcgagttcccggactactgcacgcccgaggtgagcgagatgatctcgggagactggctcgagtccagcatctccaacctggttttcacctactgaagggcgcgcaggcagggagaagggccggggggggtaggagaggagaaaaaaaaagtgaaaaaaagaaacgaaaaggacagacgaagagtttaaagagaaaagggaaaaaagaaagaaaaagtaagcagggctggcttcgcccgcgttctcgtcgtcggatcaaggagcgcggcggcgttttggacccgcgctcccatcccccaccttcccgggccggggacccactctgcccagccggagggacgcggaggaggaagagggtagacaggggcgacctgtgattgttgttattgatgttgttgttgatggcaaaaaaaaaaaagcgacttcgagtttgctcccctttgcttgaagagaccccctcccccttccaacgagcttccggacttgtctgcacccccagcaagaaggcgagttagttttctagagacttgaaggagtctcccccttcctgcatcaccaccttggttttgttttattttgcttcttggtcaagaaaggaggggagaacccagcgcacccctccccccctttttttaaacgcgtgatgaagacagaaggctccggggtgacgaatttggccgatggcagatgttttgggggaacgccgggactgagagactccacgcaggcgaattcccgtttggggcttttttttcctccctcttttccccttgccccctctgcagccggaggaggagatgttgaggggaggaggccagccagtgtgaccggcgctaggaaatgacccgagaaccccgttggaagcgcagcagcgggagctaggggcgggggcggaggaggacacgaactggaagggggttcacggtcaaactgaaatggatttgcacgttggggagctggcggcggcggctgctgggcctccgccttcttttctacgtgaaatcagtgaggtgagacttcccagaccccggaggcgtggaggagaggagactgtttgatgtggtacaggggcagtcagtggagggcgagtggtttcggaaaaaaaaaaagaaaaaaagaaaaaaaaagaaaaaaaaaagatttttttcttctcttaatcggaatcgtgatggtgttggattatttcaatggtggggttaatatagcatgttatcctgtctatcttttaaagatttctgtataagactgttgagcagtttttaaaatagtgtaggataatataaaaagcagatagatggcgctatgtttgattcctacaacgaaattatcaccagctttttttcattcttaactctttaaaggattcaaacgcaactcaaatctgtgctggactttaaaaaaacaattcaggaccaaattttttctcagtgtgtgtgtttattccttataggtgtaaatgagaagacgtgtttttttccttcaccgatgctccatcctcgtatttctttttccttgtaaatgtaatcagatgccattttatatgtggacgtatttatactggccaaacatattttttcttttgtccctttttttctttcctttctttttacttcctttatttctttattccttccttttcctttttttcttttttttttctttttttttttttttttttggtagttgttgttacccacgccattttacgtctccttcactgaagggctagagttttaacttttaattttttatatttaaatgtagacttttgacacttttaaaaaacaaaaaaagacaagagagatgaaaacgtttgattattttctcagtgtatttttgtaaaaaatatataaagggggtgttaatcggtgtaaatcgctgtttggatttcctgattttataacagggcggctggttaatatctcacacagtttaaaaaatcagcccctaatttctccatgtttacacttcaatctgcaggcttcttaaagtgacagtatcccttaacctgccaccagtgtccaccctccggcccccgtcttgtaaaaaggggaggagaattagccaaacactgtaagcttttaagaaaaacaaagttttaaacgaaatactgctctgtccagaggctttaaaactggtgcaattacagcaaaaagggattctgtagctttaacttgtaaaccacatcttttttgcactttttttataagcaaaaacgtgccgtttaaaccactggatctatctaaatgccgatttgagttcgcgacactatgtactgcgtttttcattcttgtatttgactatttaatcctttctacttgtcgctaaatataattgttttagtcttatggcatgatgatagcatatgtgttcaggtttatagctgttgtgtttaaaaattgaaaaaagtggaaaacatctttgtacatttaagtctgtattataataagcaaaaagattgtgtgtatgtatgtttaatataacatgacaggcactaggacgtctgcctttttaaggcagttccgttaagggtttttgtttttaaacttttttttgccatccatcctgtgcaatatgccgtgtagaatatttgtcttaaaattcaaggccacaaaaacaatgtttgggggaaaaaaaagaaaaaatcatgccagctaatcatgtcaagttcactgcctgtcagattgttgatatataccttctgtaaataactttttttgagaaggaaataaaatcagctggaactgaaccctaaaaaaaaaaaaaaaaaaaaaaaaaaaaaaaaaaaa

SEQ ID NO: 946 - DNA, 4333 bp, Homo sapiens
gagaaaatcaattggtttagaaggtttggactcacttgacaggttcagttggagacgatcataggtggctgctgtgacaaagggaaattgtgcttttccagcatgcttactgaccctgatttacctcaggagtttgaaaggatgtcttccaagcgaccagcctctccgtatggggaagcagatggagaggtagccatggtgacaagcagacagaaagtggaagaagaggagagtgacgggctcccagcctttcaccttcccttgcatgtgagttttcccaacaagcctcactctgaggaatttcagccagtttctctgctgacgcaagagacttgtggccataggactcccacttctcagcacaatacaatggaagttgatggcaataaagttatgtcttcatttgccccacacaactcatctacctcacctcagaaggcagaagaaggtgggcgacagagtggcgagtccttgtctagtacagccctgggaactcctgaacggcgcaagggcagtttagctgatgttgttgacaccttgaagcagaggaaaatggaagagctcatcaaaaacgagccggaagaaacccccagtattgaaaaactactctcaaaggactggaaagacaagcttcttgcaatgggatcggggaactttggcgaaataaaagggactcccgagagcttagctgagaaagaaaggcaactcatgggtatgatcaaccagctgaccagcctccgagagcagctgttggctgcccacgatgagcagaagaaactagctgcctctcagattgagaaacagcgtcagcaaatggagctggccaagcagcaacaagaacaaattgcaagacagcagcagcagcttctacagcaacaacacaaaatcaatttgctccagcaacagatccaggttcaaggtcagctgccgccattaatgattcccgtattccctcctgatcaacggacactggctgcagctgcccagcaaggattcctcctccctccaggcttcagctataaggctggatgtagtgacccttaccctgttcagctgatcccaactaccatggcagctgctgccgcagcaacaccaggcttaggcccactccaactgcagcagttatatgctgcccagctagctgcaatgcaggtatctccaggagggaagctgccaggcataccccaaggcaaccttggtgctgctgtatctcctaccagcattcacacagacaagagcacaaacagcccaccacccaaaagcaaggatgaagtggcacagccactgaacctatcagctaaacccaagacctctgatggcaaatcacccacatcacccacctctccccatatgccagctctgagaataaacagtggggcaggccccctcaaagcctctgtcccagcagcgttagctagtccttcagccagagttagcacaataggttacttaaatgaccatgatgctgtcaccaaggcaatccaagaagctcggcaaatgaaggagcaactccgacgggaacaacaggtgcttgatgggaaggtggctgttgtgaatagtctgggtctcaataactgccgaacagaaaaggaaaaaacaacactggagagtctgactcagcaactggcagttaaacagaatgaagaaggaaaatttagccatgcaatgatggatttcaatctgagtggagattctgatggaagtgctggagtctcagagtcaagaatttatagggaatcccgagggcgtggtagcaatgaaccccacataaagcgtccaatgaatgccttcatggtgtgggctaaagatgaacggagaaagatccttcaagcctttcctgacatgcacaactccaacatcagcaagatattgggatctcgctggaaagctatgacaaacctagagaaacagccatattatgaggagcaagcccgtctcagcaagcagcacctggagaagtaccctgactataagtacaagcccaggccaaagcgcacctgcctggtggatggcaaaaagctgcgcattggtgaatacaaggcaatcatgcgcaacaggcggcaggaaatgcggcagtacttcaatgttgggcaacaagcacagatccccattgccactgctggtgttgtgtaccctggagccatcgccatggctgggatgccctcccctcacctgccctcggagcactcaagcgtgtctagcagcccagagcctgggatgcctgttatccagagcacttacggtgtgaaaggagaggagccacatatcaaagaagagatacaggccgaggacatcaatggagaaatttatgatgagtacgacgaggaagaggatgatccagatgtagattatgggagtgacagtgaaaaccatattgcaggacaagccaactgataagggtcaaaagattgttgtgaccttaggacttaaagaagccctaactggttcatccttaccagtggccaagcacattaactttctcatacactgactgttactttaactgttagtcttaaatagttgggacatcagctgactaatagacctcagcctcaaaaggcttggaaagaaaaaacaaatacaacaagcaaacaacaatatcaacaacaagagattgaaataagctatgggtaaaataatgccagtaattcagctgctacatccaagcactgaagtcttacccgtcaacttttttttttttttaaataaactttatggctgtttgttctacaatgttctagaaattctcactcaggtacacagtgccaacaagtggcttgtgaatgtgttttgttgttttgtgctacaatttttaaaaagaaaaaagttttgttttgttttttggggtttctgggttttttccttttctttttctttcctttcattttttttctttgtaatgcacctgacagaaaaaaaagaaaaatgaatttctctttacttctctccaccttctccatctctctactttaaagatggaagtctgtgcatgaggggaaagagggaaaaagagcctgtttttaacttccttgctatccaccacaaaataagcaattattttctttagaggactttatctattgcacaccacactacatctttgagcaagtgccaaatttgtactgaagtgttgaccaagttcattttttctctttactttttccttttccttcttaagttaggacagtgttaaatcttagacaatcccttgaaaaacctgaaataccagcagctggtgagatttgacttttttttttaatggaaactgtaggtgctgttctcaggtgaaaagagagagagagagagagacataagaaatttagagaaaaatattttctgatcttggatttttgtgtgtatgtatgtatgtgattatggtactaataataggaataacgttggaccattgtgagttaaacccacatctggggatgaaatcccacatcctcccaagtgactggtctagaaataatcttgaccttgactttgcacttcaaatgacaacttaaccaagtatagggctcagaaattatatttttaaatgtctgattattattggatggatcaggtggccctgtgtaatagaggtgtgcatgtataacatggaagctactagcaaactgctcccagatgtcctttctccctggtcagttggttccattaacgtttgctacttagtgatttttgtttttcctgttgatattttgagcaaaacaatcattgttttcattgaatatatttggccattttttcagacaaatagaattagcttatttcttcaacattccatcctttcccgatcaggaaatgaaactgatgattttataaggtatttttcacccctccatgaagtgaggtggaggcctttagcatttcagaagtgtgggccatatgtagttcatgccataaaaagtaggatttaattaaaagtcattgcagcccaataaaatggagcctggctgcacccagggatccttgccactgctcttcccttgctgtcagattaatccactgaagtccaactttggttcaagcagagtatttgcaaagagcaacaactgaatgtgatgggactgcttatgtagattttgccagccaaatgccaaggcagttgtagggcctgtacaaataaatgcaaaatcatttcaagtcaattgccattatttgtattgaagtatcagatagatagtaaatactgcaactagtagcttgatgtgctatagttttcactccagtcatcattttcctatctcaccccccgaaacaccaccctaaagttggatttttacatataaataaaaaaagaatcccttttaaaaaaaaaaaaaaaaaa

SEQ ID NO: 947 - DNA, 8865 bp, Homo sapiens
gtcactttcatgaattcaaaggcaatttaccagtgatttctgggtgctggggctgatattttttgtgcatatttaagaatgtcttccaagcaagccacctctccatttgcctgtgcagctgatggagaggatgcaatgacccaggatttaacctcaagggaaaaggaagagggcagtgatcaacatgtggcctcccatctgcctctgcaccccataatgcacaacaaacctcactctgaggagctaccaacacttgtcagtaccattcaacaagatgctgactgggacagcgttctgtcatctcagcaaagaatggaatcagagaataataagttatgttccctatattccttccgaaatacctctacctcaccacataagcctgacgaagggagtcgggaccgtgagataatgaccagtgttacttttggaaccccagagcgccgcaaagggagtcttgccgatgtggtggacacactgaaacagaagaagcttgaggaaatgactcggactgaacaagaggattcctcctgcatggaaaaactactttcaaaagattggaaggaaaaaatggaaagactaaataccagtgaacttcttggagaaattaaaggtacacctgagagcctggcagaaaaagaacggcagctctccaccatgattacccagctgatcagtttacgggagcagctactggcagcgcatgatgaacagaaaaaactggcagcgtcacaaattgagaaacaacggcagcaaatggaccttgctcgccaacagcaagaacagattgcgagacaacagcagcaacttctgcaacagcagcacaaaattaatctcctgcagcaacagatccaggttcagggtcacatgcctccgctcatgatcccaatttttccacatgaccagcggactctggcagcagctgctgctgcccaacagggattcctcttcccccctggaataacatacaaaccaggtgataactaccccgtacagttcattccatcaacaatggcagctgctgctgcttctggactcagccctttacagctccagaagggtcatgtctcccacccacaaattaaccaaaggctaaagggcctaagtgaccgttttggcaggaatttggacacctttgaacatggtggtggccactcttacaaccacaaacagattgagcagctctatgccgctcagctggccagcatgcaggtgtcacctggagcaaagatgccatcaactccacagccaccaaacacagcagggacggtctcacctactgggataaaaaatgaaaagagagggaccagccctgtaactcaagttaaggatgaagcagcagcacagcctctgaatctctcatcccgacccaagacagcagagcctgtaaagtccccaacgtctcccacccagaacctcttcccagccagcaaaaccagccctgtcaatctgccaaacaaaagcagcatccctagccccattggaggaagcctgggaagaggatcctctttagatatcctatctagtctcaactcccctgccctttttggggatcaggatacagtgatgaaagccattcaggaggcgcggaagatgcgagagcagatccagcgggagcaacagcagcaacagccacatggtgttgacgggaaactgtcctccataaataatatggggctgaacagctgcaggaatgaaaaggaaagaacgcgctttgagaatttggggccccagttaacgggaaagtcaaatgaagatggaaaactgggcccaggtgtcatcgaccttactcggccagaagatgcagagggaggtgccactgtggctgaagcacgagtctacagggacgcccgcggccgtgccagcagcgagccacacattaagcgaccaatgaatgcattcatggtttgggcaaaggatgagaggagaaaaatccttcaggccttccccgacatgcataactccaacattagcaaaatcttaggatctcgctggaaatcaatgtccaaccaggagaagcaaccttattatgaagagcaggcccggctaagcaagatccacttagagaagtacccaaactataaatacaaaccccgaccgaaacgcacctgcattgttgatggcaaaaagcttcggattggggagtataagcaactgatgaggtctcggagacaggagatgaggcagttctttactgtggggcaacagcctcagattccaatcaccacaggaacaggtgttgtgtatcctggtgctatcactatggcaactaccacaccatcgcctcagatgacatctgactgctctagcacctcggccagcccggagcccagcctcccggtcatccagagcacttatggtatgaagacagatggcggaagcctagctggaaatgaaatgatcaatggagaggatgaaatggaaatgtatgatgactatgaagatgaccccaaatcagactatagcagtgaaaatgaagccccggaggctgtcagtgccaactgaggagtttttgtttgctgaattaaagtactctgacatttcacccccctccccaacaaagagttattaaagagcccgcatgcatttgtggctccacaattacatcagcagaatggtcttaattgtttcgtaaagtgtgagacagattaagttttccctgatttttcatgaacttgagttttttgttgttattgttattgttgttgttgttgtttttttaatttaggtgaagacatattaaatatgagacaccaggacttgaaacttatctcaacccgtagatgtcttacaagtcttatatttttgtcttactttttttttcttttggatgttgataaaggtttaagttactgttttagatggggttaaacattctcactcaggtatgctgtgccggcctacaggttgtgaatgtgtttttattctgaattattttagaaaacaactgaggatttcatattgtgaaacagaacaagtccacggcgtgtgcagctgcatgtagagcatattcaaaaggcctcggaattccaattttccatttgtagagttaaactttgaatgtgccaaactttttcgtaacttttgaatcttaatattttgaaagtcttaaaggagacactgcaaagtcttagacaatctttggcatcttaaaataaaatagcaaaccaacatttttttttccagaaaatggtaaggtactcaggaatctggagacaagatattgtaaggaatgaacaaggttgccacagtgcatggacccaattgtgtttgcctgttgacgtgccatcagtgcgtgatgtggtatgacatacacacaccagagcaaccgccacaccagatatcgacagagtggtcttctctgcctgagaccacctctcactacatccattatccctttgcctttaaccctgacattcagtcttaacacattttatcttaaataatttattcattccagaatgtcaagggtccacttgctatttattttttttcaattgttggtggcattaatttaataattcttgtttttcaccttccttccccgaagaacttttccgtccttttcacctccttctcctgtgtacatagtgattttatgtccccagaacgcctggaagcatttctgaaaccaagatattattaaaaacctattattgtttttaatcatgagtatgtatctggctgcagggctgtgtattgggatataggtatatagtcttacacttaaacaggtatgcccctgaggttcactgtgacctcaagtcttttgccagaattttcccctaattcagttcacaagtggtagggtctgcatcagtggcatttccccctgaattccattcagcagcaaggttcaacagtggtgactgccaggcaggagagtcctgcggccaaacctgaagcccaaggctcgtgggccatgcaggaatctcagtgaagctgtcatgggctggcacctttacactgagttgccttgtcccagctggcacatctagggagttcattgcaaaatccccaggatgcaaaaagccacatgacagcctcagagcaaagatggtggcaaatagtcatgatacatctagagaatgaaagaaaactgtaagggaggagaaggaggggaatacattccctatatgggatgttcctactgttaactctggggaacagatagctccgggggcagcagatgagttcctctggctgactctatctgtagccacatggggacctgcctacgtgtgaacaaaatgaactgcacttatcacacaaggatttctttgaagacatgctactggggtgggaagcagtgaggttttattccccatctcctaactacagggagctctgccatgtcattttggccttcctgaaactaggacaggttgtctatcggggggcttcccccagagaggtttagtgggagaatgtcagtgaatgggatagttcacctcatgggacaacccagaatctgatcaccaggacataggaatggccccatcagatttcttgagccattttgtcacttggaagaaaatagtgtacctttgtatttatttaagagtgctcaaggcctaatagcaataaacaggtctagccaagaaattacaagctattctgttagctgggagtgctctctataagctgattaaggtactgataggaactctttgttattcatgttggttggggattagaaatttgtttttgtacatttatttcaaatgaggaggaggtcattttttctctcaaaaaatgagtatttattattgtcttactgatttctttgattatatacctctcctcctcagttcactcttgttttttttctttctctttggcttttgcttttgctctctctcacttctttcttattttgttgcattggtagagtgttgtatggctagcattgtattgtatgtaattaattttgcacaaaagcaaacatttagcatagtaggttaattttgtttgtttttatgaccatgccaaaataatattctgggctggtggagaacaaaggactgttctttaggactgaaacttgattttgctcatagtaagtaaaaaaaaacaaaaaacacacacactcacagatgttgtttcgtaagtgttataagcactggatataaatggtattttttatcacttctgactaatgtgaaactgttgtacgaaaactacatgaacaaaagtcatctgtttcgactcgtgtgggcttgcctcacagttgccggatttgagtcatttttatgtcttgttatttcatttatttatgcaaaatacatgtgtgtatgaacactttgttttagctccagctctgcctcagtactggggttcatttacttttagccatgttcttaaaaatgaaaggctattcaggaatgatctgattgtaaacgtctttttcattggatcaaacagtaatgctgtatttgaatctaaattttgtgtataagcagtttatttattagccaagtttggctctaaatatccatggaaattaagaatgacaatcatagggatcaattcattttattttcagtggggcttaaacaaagtttatatgactttaccatctcattttagatttttctaattgtgtaaatataacatagaaatagaatttatttttggttcatgaatacttagtgagatataagttatgtatttcctttttgttctctatccatagatgttggtccaaactgaaagttgatgagtcactgtgcctctcggggtagtgagttatcagctacagtgagagagcagtgtttggcctgcagctgggacagcaaaacgtttcaccagggttctcatgcagttcagaacccactgtccacagatccagacatttcccttttttcttacagaaagttgatgattggacatactaaatttccactacagttaggagacagtcagtttgctttgggagtctacataaatcttctaagatagttctgtgaccatttaatagcaagaagcatgaatgccactacaaaggcaaaaatccacctctgagatcggccgttaataaacgtcccgtcatgtcagtttagattcaagaatgttaagcaactttgtttttgcggtgctccctatttcatagtatcttcaaatcaaaaataaaaattatctccattttgttaaagaacttacagggtcagggttctccttgtcacttagaattgggacactgccaggcaatcctctcccaaaaaaaaaaaaaaaaaaaaatagccatatggaatggaaggaaaaggagaaaagaaggaagaaaggaaaaaagtaggaagggagagagaaaaaaaaggtcgctttgcggatacgagccgctaggctgacaacttttctatttcattggcagatatgaagcagtgtcttttccagtaaggtacggaagctttgttgttttcatgtgtacccagctcagccttttagaagcacctcggtttgcttcattaggtatttgatactctccagccttgtcctcaggcctgatttgatttgccagggtcctgacaccaaagcccaggccaagttctaaattcaggtgtgggctcacagtgctattgagcttgtcgaattctggcctcccctgaacattagccccacgggagcctgagggtgtttgaaaagggcgtgatcactctagggctgaaattaaaggctgctttcttttccttctgaagccaggctgcttcttcggagtacaccctcctgagccaggagcacaagcactagcagaaagcagggattgtttcaggaaagcccatttaccctcagtaggaaggcagcctggtcacttgaacagcacagctgaggctgcttctctcaatttactcattttgcaaagaattgacctctaccaactcattagggagaggaaaaagaatcacttagtaattttaaatcatatgagaagtcctgtaccaagtgccaacaactgcaaagaaatgcagctagaggaatgtattgaaattactactgggtcttcctttttaatgagaaaatgacaaaaatggttgctgtagccctgcctgattttgtacacgtttgtctaagaattgagttggcacttaagctcacttctcaaagtataataatattgtatgacctcatttgtcctttcacaaaagcacttgcatcatttccttaagtcatctgctccctgacatgttttcttccctaataaacaacttctgtctgttattcctgccaatgatgttctgtttctgatgccatatcctattgagcgtgcccctgtactaatatcattgaaaatattgatatgcaaacacatttccttttcatccccattctatctttccctttggggacagattgctttccaaaagctcatgaacaaatatttggaatgctggtacctttggggcagaggtaagggtgggcggggtgggggcagaaaggtaatgcttaatgcagataactcttctaatcagtgtccatggcaatatgaacgcttgaagaaaactcagtgacatatcttgctcagtagtttcttattcctgaagaaccacaagcataaagtgaggcctcagtgctggtgctcttggagtatggggaatgtgcaaatatttaactgttttgtatgctgcacattgcaggtctgctcatgtgcattctccctttgtcttcctttgtcatatgtgtttttgcttttttgaaagtgcagtctttattgtaccctcctccagcttgtagcaaattagaatgcttagcatttatgttcattcattattgtatttgccatgtaaaatttttattaccttagacaagcttataagctgttactacataacttatcttactgtaactcttttatttcccccgacgttgtaatttgtttgtgatgtatattgtgaaattgtattctatgttaatttaatcagcacaattcactgacatgctggactgacatgctggctgctgtttcaaagtgtaaagtttgtgtagggctgttgggacaactgcaactctgttgtcaaggtactgtgctttggttcctatagcaacactgggtgtggcccttgaattgctaagggcatttaatacatcctggagcaaattttaactgcagattttctttgtagaaattctatgtataatgcaggtacctacttggcccatggctggtaactatttgggcaattagaaaaaaagaaaaaaacataaaaactagtgtctattgctgctttgaatatgtttgaaagtctgaaaatgtaaatagtttatcaaaaaaaaatcttgtacagtccagtgtaaagtttttaaatgaccttaagggttgccatcacatctttctcacactctcctcttgataataataataataaaaagtttgctaaggattaaagaaatgggaaaaataaaaaaaatctcttcaaatttacaggaatgaatcattgttcttagctttgttgcatacacaaacttcttggattttgttgtgcagtattgacgtgagataaagctcaacattgaataatctttcagtggtacttttcaaagtcttcccctcctctgcctcataattaagggaaaagacaaaattgaaagacacactgtctttatctatcctggtgtatgttggcaccttagctactttttttttttcctttttgcacaaggtgctttcctgatatgttcaacatgccatctttgggtgataatgtatatgccgtgatggggctcaggccccttaggggagtgtctataagaactgcctatttatgctcatttacctcaagactgtcctctctaccctaatctagttgtcatcactccatcttttgtactgctgttgacacttacaaattaaagataaattttgttttatga

SEQ ID NO: 948 - DNA, 3219 bp, Homo sapiens
aagttggacgccccgacccgtgcgagggccaggtccgcgcctgccccgccaggcgaagcgaggcgacccgcgtgcggccatggcttcgctgctgggagcctacccttggcccgagggtctcgagtgcccggccctggacgccgagctgtcggatggacaatcgccgccggccgtcccccggcccccgggggacaagggctccgagagccgtatccggcggcccatgaacgccttcatggtttgggccaaggacgagaggaaacggctggcagtgcagaacccggacctgcacaacgccgagctcagcaagatgctgggaaagtcgtggaaggcgctgacgctgtcccagaagaggccgtacgtggacgaggcggagcggctgcgcctgcagcacatgcaggactaccccaactacaagtaccggccgcgcaggaagaagcaggccaagcggctgtgcaagcgcgtggacccgggcttccttctgagctccctctcccgggaccagaacgccctgccggagaagagaagcggcagccggggggcgctgggggagaaggaggacaggggtgagtactcccccggcactgccctgcccagcctccggggctgctaccacgaggggccggctggtggtggcggcggcggcaccccgagcagtgtggacacgtacccgtacgggctgcccacacctcctgaaatgtctcccctggacgtgctggagccggagcagaccttcttctcctccccctgccaggaggagcatggccatccccgccgcatcccccacctgccagggcacccgtactcaccggagtacgccccaagccctctccactgtagccaccccctgggctccctggcccttggccagtcccccggcgtctccatgatgtcccctgtacccggctgtcccccatctcctgcctattactccccggccacctaccacccactccactccaacctccaagcccacctgggccagctttccccgcctcctgagcaccctggcttcgacgccctggatcaactgagccaggtggaactcctgggggacatggatcgcaatgaattcgaccagtatttgaacactcctggccacccagactccgccacaggggccatggccctcagtgggcatgttccggtctcccaggtgacaccaacgggtcccacagagaccagcctcatctccgtcctggctgatgccacggccacgtactacaacagctacagtgtgtcatagagctggaggcgccccgtccggtcagccctcgcgccctctccttcttgtgccttgagtggcagaggagccgtccagccacaccagctttcctcccaccgctcagggcagggaggtctgaactgcggccccagagcctttggcctaagctggactctccttatccgagtgccgcctctatccccttccccacgttccagcccctgcagcccacattttaagtatattccttcaagtgagttttcctccagcccctgagagttgctgtctcccagtggaatgttcactgacgtcttttcttggtagccatcatcgaaactaatggggggacagacttgatagccaaggtcccttctggtccagttttctgatttagggttctctcaagattaataaaggaagatggggaaatttgactcattaatgagctcgctaacctacgatctggtgataattttgtgtgcacagcccaaggaccacgaggctttctgcactttctgcacccccttccaaagtgaccacaaaatttcaaagggactcatacaatttgagaaaaaacagtcaacctgatttgagaaattaaccagtatggctaactatatcacagaaaatgggattgagttaaaactattttattttaaatatacattttaaagcagttctttttttttgttaatttgtttattatacacacacttcaagagaatatgcacagtctaggccgggcacggtggctcacgcctgtaatcccagcactttgggaggccgaggcatgtggatcacctgaggtcaggagtttgagaccagcctagacaacatggtgaaaccttgtctctatgaaaaatacaaaatttgctgggagtggtggtgcatgcctgtaatcccagctacttggaaggctgaggcaggagaatgtcttgaacctaggaggtggaggttgcagtgagctgagattgcaccattgcactccagcctgtgcaacaagagtgaaactccatttcaagaaaaaaaaaaaaaaaagaatatgcacagtctgaatgtataccaggagtgtgagagacacatgcccacttcatgcaactcctaaactcaaagtctaaatcagatatttttattaacaatgacaacttgttgccaactccctgtttctaatgaccaaagacccagggtacctaaaaggactttgcaaccaagcaaagtcactgtcttcaaatctggatacacactttcccctctgtagattcaaaaggtgcttccttcccggctgtctccagcttccttactctcttttctgggatttctttttctcttctttctgctcttcctccactgctgaactggtccctaactgaaacagcccctgacttatcccaagcatgcttcctttagctgctgtgagaatttgtcttcctcaccagccaggtcctcaggcaaagtcctcagccagtgctttagagcaacttcccgcaaatcagaaactcactgtgattccaaaaatgtttctgagccctggacccctgcccccaaaatattttcatctttcccccaaacctcctttaaaggagcatgcataacagtgtgctgaaagacagttgttggttttttgattttagcatattatttcctgtatgaaatatgttttatataatctcctattatttttatcttatgttttgtattgttgataaatcctttttgtccttctaagatgtcctattgtaaaatcacttataaggtatgattactctttatgctattactttatatgccatttggtaataaatagtaaattgttgatgatatgattgactgatgcgcagtccagagcatgtatgaataatctcataaaacagtatcacagacattaagctaaactgtttcgtttttttgaaagaacaactcatactttggaacagttgtcaatattaatttgttgcaaatatttaatttaaataaacatttttgtaccatgaaaa

SEQ ID NO: 949 - DNA, 3049 bp, Homo sapiens
ggcgagggtcggggccaccgcgcggcgacctcgggtcccggagcgaccgcagggcagccccgggcgccggccccggtgcgcgtctcctgtgcgcgcccctccgcgcgcggccccgatgctggacatgagcgaggcccgctcccagccgccctgcagcccgtccggcaccgccagctccatgtcgcacgtggaggactcggactcggacgcgccgccgtctcccgccggctccgagggcctgggccgcgcgggggtcgcggtggggggcgcccggggcgacccggcggaggcggcggacgagcgcttcccggcctgcatccgcgacgccgtgtcgcaggtgctcaagggctacgactggagtctggtgcccatgccggtgcgcggcggcggcggcggcgcgctcaaagccaagccgcatgtgaagcggcccatgaacgcattcatggtgtgggcgcaggcggcgcgccgcaagctggccgaccagtacccgcacctgcacaacgccgagctcagcaagacgctgggcaagctgtggcgcttgctgagcgagagcgagaagcggcccttcgtggaggaggcagagcgccttcgcgtgcagcacaagaaggaccaccccgactacaagtaccagccacggcgcaggaagagcgccaaagccggccacagcgactccgactcgggcgcggagctgggaccccaccctggcggcggtgccgtgtacaaggctgaagcagggcttggagatgggcaccaccatggcgaccacacagggcagacccacgggccgcccaccccgcccaccacccccaagacggagctgcagcaggcgggcgccaagccggagctgaagctggagggacgccggccggtggacagcgggcgccagaacatcgacttcagcaatgtggacatctcggagctcagcagcgaggtcatgggcaccatggacgccttcgacgtccacgagttcgaccagtacctgcccctgggcggccccgccccacccgagccgggccaggcctatgggggcgcctacttccacgccggggcgtcccccgtgtgggcccacaagagtgccccgtcggcctccgcgtcgcccaccgagacgggtcccccacggccgcacatcaagacggagcagccgagccccggccactacggcgaccagccccgaggctcgcccgactacggttcctgcagcggccagtccagcgccaccccggccgcccccgccggccccttcgccggctcacagggcgactatggcgacctgcaggcctccagctactatggtgcctaccctggctacgcacccggcctctaccagtacccctgcttccactcgccgcgccggccctacgcctcacccctgctcaacggcctggccctgccgcccgcccacagccccaccagtcactgggaccagccggtgtacaccaccctgaccaggccctgagggcccagccgcggggagggactcgcaggcgtcagggggcagccttgtcccggcccagtgtgtgtgaccagggcgggaggggccccagtggctgagctccaagtgcctgctgaagtctgcagggaaacacgcttgctgcccgtggccctcggcctccagatggccacacctctgccgacgacggaccagctccctctcccttctatctttctttttgaggtggtgggattattccacaaagaagggctgccgtttggtccctcttccgtgaggactggcggcaccagcaccttcgctttgcatctcggtagaggagaaacggcagcacagcccaaggaccaaaggagggggtggcaggggccttgcagggcgctgtgaggtccaggccggtcttggcgccgagagcccctgcactcaaggccacattccctcgacaacggctgcacgggctgtccgggatccggggtgtctgtccgcagactgggatgagtctactcgagcatctccgggacctgcctgtcagatctgaggtgtctccttgctggcagagtgcgctcacgcgagggctggctgtgatgaacacatctctcttttatttttatgtttttgataatttttatttttgaagcttaaatgtgtttcttctgaaagctgttaaagatgtatttatgttctgtgttattttatctttaattaatgaggtaattcgggcaaagagtagaatttaagacaaaacggaagctgggaagcttcccttgagggcaggcaggaggtggagttgcagctgttggccggcatcacgttgctcgttgctcggcttatgggaggccgccctggagggcccggaggtcccaaggtccctgggaggactgggcccctcatgcctcgagcttggcaaccgaaaacccgagggaggagaagggacctgccttgtgacatctctgatcaggttggggtgccccagcacccagtaccagtttggggtttgggaagcaggactccgtccctgtccccgactgtgccacgtggtaggacacataggacacaggaattcctgggtccttgcccatgactgtgccatgtggtaggacacaggacacaggaattcctggaaagtggtggcttcagaagtgatcttggctcgcaggcaccagtgccacctaccaagctgtgaaactaaaccttctccactaaacgtcgttagggcctcagttctagacgagtcatacctgattcacctgcactgcttcccctgtgtgctgagcatagagcatacaatagcgcctacttcacggaaacttgtgcctttaaactttgtaaacttaaacacagccgagaagttgcttctttgtactttttctacttttcctacttttttgtagaaaaaaaagataatgcctctgcttctatttctctgggggtgggggtgggggccgggagccgtcgcagacccgtttcatgcagcgtctcccttggcaccgcgttcggaggacgcaccctcactcccctgctgccttcactcctttctgaccaagcaacgctaacttttgtacagatcgatttgataaaattaaacaaagtgctttttatgga

SEQ ID NO: 950 - DNA, 3963 bp, Homo sapiens
ggagagccgaaagcggagctcgaaactgactggaaacttcagtggcgcggagactcgccagtttcaaccccggaaacttttctttgcaggaggagaagagaaggggtgcaagcgcccccacttttgctctttttcctcccctcctcctcctctccaattcgcctccccccacttggagcgggcagctgtgaactggccaccccgcgccttcctaagtgctcgccgcggtagccggccgacgcgccagcttccccgggagccgcttgctccgcatccgggcagccgaggggagaggagcccgcgcctcgagtccccgagccgccgcggcttctcgcctttcccggccaccagccccctgccccgggcccgcgtatgaatctcctggaccccttcatgaagatgaccgacgagcaggagaagggcctgtccggcgcccccagccccaccatgtccgaggactccgcgggctcgccctgcccgtcgggctccggctcggacaccgagaacacgcggccccaggagaacacgttccccaagggcgagcccgatctgaagaaggagagcgaggaggacaagttccccgtgtgcatccgcgaggcggtcagccaggtgctcaaaggctacgactggacgctggtgcccatgccggtgcgcgtcaacggctccagcaagaacaagccgcacgtcaagcggcccatgaacgccttcatggtgtgggcgcaggcggcgcgcaggaagctcgcggaccagtacccgcacttgcacaacgccgagctcagcaagacgctgggcaagctctggagacttctgaacgagagcgagaagcggcccttcgtggaggaggcggagcggctgcgcgtgcagcacaagaaggaccacccggattacaagtaccagccgcggcggaggaagtcggtgaagaacgggcaggcggaggcagaggaggccacggagcagacgcacatctcccccaacgccatcttcaaggcgctgcaggccgactcgccacactcctcctccggcatgagcgaggtgcactcccccggcgagcactcggggcaatcccagggcccaccgaccccacccaccacccccaaaaccgacgtgcagccgggcaaggctgacctgaagcgagaggggcgccccttgccagaggggggcagacagccccctatcgacttccgcgacgtggacatcggcgagctgagcagcgacgtcatctccaacatcgagaccttcgatgtcaacgagtttgaccagtacctgccgcccaacggccacccgggggtgccggccacgcacggccaggtcacctacacgggcagctacggcatcagcagcaccgcggccaccccggcgagcgcgggccacgtgtggatgtccaagcagcaggcgccgccgccacccccgcagcagcccccacaggccccgccggccccgcaggcgcccccgcagccgcaggcggcgcccccacagcagccggcggcacccccgcagcagccacaggcgcacacgctgaccacgctgagcagcgagccgggccagtcccagcgaacgcacatcaagacggagcagctgagccccagccactacagcgagcagcagcagcactcgccccaacagatcgcctacagccccttcaacctcccacactacagcccctcctacccgcccatcacccgctcacagtacgactacaccgaccaccagaactccagctcctactacagccacgcggcaggccagggcaccggcctctactccaccttcacctacatgaaccccgctcagcgccccatgtacacccccatcgccgacacctctggggtcccttccatcccgcagacccacagcccccagcactgggaacaacccgtctacacacagctcactcgaccttgaggaggcctcccacgaagggcgaagatggccgagatgatcctaaaaataaccgaagaaagagaggaccaaccagaattccctttggacatttgtgtttttttgtttttttattttgttttgttttttcttcttcttcttcttccttaaagacatttaagctaaaggcaactcgtacccaaatttccaagacacaaacatgacctatccaagcgcattacccacttgtggccaatcagtggccaggccaaccttggctaaatggagcagcgaaatcaacgagaaactggactttttaaaccctcttcagagcaagcgtggaggatgatggagaatcgtgtgatcagtgtgctaaatctctctgcctgtttggactttgtaattatttttttagcagtaattaaagaaaaaagtcctctgtgaggaatattctctattttaaatatttttagtatgtactgtgtatgattcattaccattttgaggggatttatacatatttttagataaaattaaatgctcttatttttccaacagctaaactactcttagttgaacagtgtgccctagcttttcttgcaaccagagtatttttgtacagatttgctttctcttacaaaaagaaaaaaaaaatcctgttgtattaacatttaaaaacagaattgtgttatgtgatcagttttgggggttaactttgcttaattcctcaggctttgcgatttaaggaggagctgccttaaaaaaaaataaaggccttattttgcaattatgggagtaaacaatagtctagagaagcatttggtaagctttatcatatatatattttttaaagaagagaaaaacaccttgagccttaaaacggtgctgctgggaaacatttgcactcttttagtgcatttcctcctgcctttgcttgttcactgcagtcttaagaaagaggtaaaaggcaagcaaaggagatgaaatctgttctgggaatgtttcagcagccaataagtgcccgagcacactgcccccggttgcctgcctgggccccatgtggaaggcagatgcctgctcgctctgtcacctgtgcctctcagaacaccagcagttaaccttcaagacattccacttgctaaaattatttattttgtaaggagaggttttaattaaaacaaaaaaaaattcttttttttttttttttccaattttaccttctttaaaataggttgttggagctttcctcaaagggtatggtcatctgttgttaaattatgttcttaactgtaaccagtttttttttatttatctctttaatctttttttattattaaaagcaagtttctttgtattcctcaccctagatttgtataaatgcctttttgtccatcccttttttctttgttgtttttgttgaaaacaaactggaaacttgtttctttttttgtataaatgagagattgcaaatgtagtgtatcactgagtcatttgcagtgttttctgccacagacctttgggctgccttatattgtgtgtgtgtgtgggtgtgtgtgtgttttgacacaaaaacaatgcaagcatgtgtcatccatatttctctgcatcttctcttggagtgagggaggctacctggaggggatcagcccactgacagaccttaatcttaattactgctgtggctagagagtttgaggattgctttttaaaaaagacagcaaacttttttttttatttaaaaaaagatatattaacagttttagaagtcagtagaataaaatcttaaagcactcataatatggcatccttcaatttctgtataaaagcagatctttttaaaaagatacttctgtaacttaagaaacctggcatttaaatcatattttgtctttaggtaaaagctttggtttgtgttcgtgttttgtttgtttcacttgtttccctcccagccccaaaccttttgttctctccgtgaaacttacctttccctttttctttctcttttttttttttgtatattattgtttacaataaatatacattgcattaaaaagaaaaaaaaaaaaaaaaaaaaaaaaaaaaaaa

SEQ ID NO: 951 - DNA, 2655 bp, Homo sapiens
acaggtgagcttgacctcacagccacacaactttcacagggtgccaatggctggcagatcatctcttcctcctctggggctacccctacctcaaaggaacagagtggcagcagtaccaatggcagcaatggcagtgagtcttccaagaatcgcacagtctctggtgggcagtatgttgtggctgccgctcccaacttacagaaccagcaagttctgacaggactacctggagtgatgcctaatattcagtatcaagtaatcccacagttccagaccgttgatgggcaacagctgcagtttgctgccactggggcccaagtgcagcaggatggttctggtcaaatacagatcataccaggtgcaaaccaacagattatcacaaatcgaggaagtggaggcaacatcattgctgctatgccaaacctactccagcaggctgtccccctccaaggcctggctaataatgtactctcaggacagactcagtatgtgaccaatgtaccagtggccctgaatgggaacatcaccttgctacctgtcaacagcgtttctgcagctaccttgactcccagctctcaggcagtcacgatcagcagctctgggtcccaggagagtggctcacagcctgtcacctcagggactaccatcagttctgccagcttggtatcatcacaagccagttccagctcctttttcaccaatgccaatagctactcaactactactaccaccagcaacatgggaattatgaactttactaccagtggatcatcagggaccaactctcaaggccagacaccccagagggtcagtgggctacaggggtctgatgctctgaacatccagcaaaaccagacatctggaggctcattgcaagcaggccagcaaaaagaaggagagcaaaaccagcagacacagcagcaacaaattcttatccagcctcagctagttcaagggggacaggccctccaggccctccaagcagcaccattgtcagggcagacctttacaactcaagccatctcccaggaaaccctccagaacctccagcttcaggctgttccaaactctggtcccatcatcatccggacaccaacagtggggcccaatggacaggtcagttggcagactctacagctgcagaacctccaagttcagaacccacaagcccaaacaatcaccttagccccaatgcagggtgtttccttggggcagaccagcagcagcaacaccactctcacacccattgcctcagctgcttccattcctgctggcacagtcactgtgaatgctgctcaactctcctccatgccaggcctccagaccattaacctcagtgcattgggtacttcaggaatccaggtgcacccaattcaaggcctgccgttggctatagcaaatgccccaggtgatcatggagctcagcttggtctccatggggctggtggtgatggaatacatgatgacacagcaggtggagaggaaggagaaaacagcccagatgcccaaccccaagccggtcggaggacccggcgggaagcatgcacctgcccctactgtaaagacagtgaaggaaggggctcgggggatcctggcaaaaagaaacagcatatttgccacatccaaggctgtgggaaagtgtatggcaagacctctcacctgcgggcacacttgcgctggcatacaggcgagaggccatttatgtgtacctggtcatactgtgggaaacgcttcacacgttcggatgagctacagaggcacaaacgtacacacacaggtgagaagaaatttgcctgccctgagtgtcctaagcgcttcatgaggagtgaccacctgtcaaaacatatcaagacccaccagaataagaagggaggcccaggtgtagctctgagtgtgggcactttgcccctggacagtggggcaggttcagaaggcagtggcactgccactccttcagcccttattaccaccaatatggtagccatggaggccatctgtccagagggcattgcccgtcttgccaacagtggcatcaacgtcatgcaggtggcagatctgcagtccattaatatcagtggcaatggcttctgagatcaggcacccggggccagagacatatgggccataccccttaaccccgggatgcaaggtagcatgggtccaagagacatggaagagagagccatgaagcattaaaatgcatggtgttgagaagaatcaggagagggatacaagagaggagatggggtcccggcacccatctgtatcatcagtgcctctttgaaggtgggaaacattagtgaaaattctgttggtgccacgctttgatgagcatttgtttgaccccagtttcttcttacacttcttaccccagcctacccttcctgcatttctcttctcagctcttccatgatggattcccccccctttcctaaagccatcatgccttgataaatatatatgatcattgaaatactttttaacaaaaaacagattctatattattatatatatatatatatataaagatatatagagatgcattcacagggttggctggagaggaagaccattctgtgaccaaaataccttggtcattttttttatattgccttatttccctatggctgagccttgttgtgacacatcaagctt

SEQ ID NO: 952 - DNA, 3688 bp, Homo sapiens
atttgggcggagccctttctgagtcagtctgtcggccgacttcctgcttggggcctgggcagccacactgcacgcaggctgggccgactgaggggctcagaggccaggctctgaggcccacgcagggcctagggtgggaagatggcaggtgggggcggcgacctgagcaccaggaggctgaatgaatgtatttcaccagtagcaaatgagatgaaccatcttcctgcacacagccacgatttgcaaaggatgttcacggaagaccagggtgtagatgacaggctgctctatgacattgtattcaagcacttcaaaagaaataaggtggagatttcaaatgcaataaaaaagacatttccattcctcgagggcctccgtgatcgtgatctcatcacaaataaaatgtttgaagattctcaagattcttgtagaaacctggtccctgtacagagagtggtgtacaatgttcttagtgaactggagaagacatttaacctgccagttctggaagcactgttcagcgatgtcaacatgcaggaataccccgatttaattcacatttataaaggctttgaaaatgtaatccatgacaaattgcctctccaagaaagtgaagaagaagagagggaggagaggtctggcctccaactaagtcttgaacaaggaactggtgaaaactcttttcgaagcctgacttggccaccttcgggttccccatctcatgctggtacaaccccacctgaaaatggactctcagagcacccctgtgaaacagaacagataaatgcaaagagaaaagatacaaccagtgacaaagatgattcgctaggaagccaacaaacaaatgaacaatgtgctcaaaaggctgagccaacagagtcctgcgaacaaattgctgtccaagtgaataatggggatgctggaagggagatgccctgcccgttgccctgtgatgaagaaagcccagaggcagagctacacaaccatggaatccaaattaattcctgttctgtgcgactggtggatataaaaaaggaaaagccattttctaattcaaaagttgagtgccaagcccaagcaagaactcatcataaccaggcatctgacataatagtcatcagcagtgaggactctgaaggatccactgacgttgatgagcccttagaagtcttcatctcagcaccgagaagtgagcctgtgatcaataatgacaaccctttagaatcaaatgatgaaaaggagggccaagaagccacttgctcacgaccccagattgtaccagagcccatggatttcagaaaattatctacattcagagaaagttttaagaaaagagtgataggacaagaccacgacttttcagaatccagtgaggaggaggcgcccgcagaagcctcgagcggggcactgagaagcaagcatggtgagaaggctcctatgacttctagaagtacatctacttggagaatacccagcaggaagagacgtttcagcagtagtgacttttcagacctgagtaatggagaagagcttcaggaaacctgcagctcatccctaagaagagggtcaggatcacagccacaagaacctgaaaataagaagtgctcctgtgtcatgtgttttccaaaaggtgtgccaagaagccaagaagcaaggactgaaagtagtcaagcatctgacatgatggataccatggatgttgaaaacaattctactttggaaaaacacagtgggaaaagaagaaaaaagagaaggcatagatctaaagtaaatggtctccaaagagggagaaagaaagacagacctagaaaacatttaactctgaataacaaagtccaaaagaaaagatggcaacaaagaggaagaaaagccaacactagacctttgaaaagaagaagaaaaagaggtccaagaattcccaaagatgaaaatattaattttaaacaatctgaacttcctgtgacctgtggtgaggtgaagggcactctatataaggagcgattcaaacaaggaacctcaaagaagtgtatacagagtgaggataaaaagtggttcactcccagggaatttgaaattgaaggagaccgcggagcatccaagaactggaagctaagtatacgctgcggtggatataccctgaaagtcctgatggagaacaaatttctgccagaaccaccaagcacaagaaaaaagagaatactggaatctcacaacaataccttagttgacccttgtgaggagcataagaagaagaacccagatgcttcagtcaagttctcagagtttttaaagaagtgctcagagacatggaagaccatttttgctaaagagaaaggaaaatttgaagatatggcaaaggcggacaaggcccattatgaaagagaaatgaaaacctatatccctcctaaaggggagaaaaaaaagaagttcaaggatcccaatgcacccaagaggcctcctttggcctttttcctgttctgctctgagtatcgcccaaaaatcaaaggagaacatcctggcctgtccattgatgatgttgtgaagaaactggcagggatgtggaataacaccgctgcagctgacaagcagttttatgaaaagaaggctgcaaagctgaaggaaaaatacaaaaaggatattgctgcatatcgagctaaaggaaagcctaattcagcaaaaaagagagttgtcaaggctgaaaaaagcaagaaaaagaaggaagaggaagaagatgaagaggatgaacaagaggaggaaaatgaagaagatgatgataaataagttgcttctagtgcagtttttttcttgtctataaagcatttaagctgcctgtacacaactcactccttttaaagaaaaaaacttcaacgtaagactgtgtaagatttgtttttaaaccgtacactgtgtttttttgtatagttaaccactaccgaatgtgtcttcagatagccctgtcctggtggtatttagccactaacctttgcctggtacagtatgggggttgtaaattggcatggaaatttaaagcaggttcttgttagtgcacagcacaaattagttgtatatgaggatggtagttttttcaccttcagttgtctctgatgtagcttatacaaaacatttgttgttctgttaactgaatgccactctgtaattgcaaaaaaaaaaaacagttgcagctgttttgttgacattctgaatgcttctaagtaaatacaatttttaaaaaaccgtatgagggaactgtgtagacaaggtaccaggtcagtcttcttccatgtctattagctccacaaagccaatctcaatccctcaaaacaatcttgtcatacttgaaaatatgacactctagtcaaagccttggtaaaataatcagtgtttccaatctgtcctgttacaaaagaaacagattattattgaacttatgcaaataaccattgtcataagaatgtttatgaatagtttccaaattatggcaaattcatgtagagagagaaaagtaactgttttggttttgctcacaaaagtctactttacctaagggctgtcagatataagtaacttaaaagaaagagaagttttcttgacttttgaaaacaaaatatgaaaagaatcggcaatgtttcaaacaaaaagtcataaaagtcactttattcctccatcaaaaaaaaaaaaaaaaaaaaaa

SEQ ID NO: 953 - DNA, 3132 bp, Homo sapiens
aatgttccaagcgcttattggtgaaggctgccgtcgctcgggcggtggcgggctccgggattggcggttgcttggcgggcggtgtcaggctctcggtggcggcggaggcggcggaggccagggaggaagatgtcgtaatgagcgatccacagaccagcatggctgccactgctgctgtgagtcccagtgactacctgcagcctgccgcctccaccacccaggactcccagccatctcccttagccctgcttgctgcaacatgtagcaaaattggccctccagcagttgaagctgctgtgacacctcctgctcccccacagcccacaccgcggaaacttgtccctatcaaacctgcccctctccctctcagccccggcaagaatagctttggaatcttgtcctccaaaggaaatatacttcagattcaggggtcacaactgagcgcctcctatcctggagggcagctggtgttcgctatccagaatcccaccatgatcaacaaagggacccgatcaaatgccaatatccagtaccaggcggtccctcagattcaggcaagcaattcccaaaccatccaagtacagcccaatctcaccaaccagatccagatcatccctggcaccaaccaagccatcatcaccccctcaccgtccagtcacaagcctgtccccatcaagccagcccccatccagaagtcgagtacgaccaccacccccgtgcagagcggggccaatgtggtgaagctgacaggtgggggcggcaatgtgacgctcactctgcccgtcaacaaccttgtgaacgccagtgacaccggggcccctactcagctcctcactgaaagccccccaaccccgctgtctaagactaacaagaaagcaaggaagaagagccttcctgcctcccagccccctgtggctgtggctgagcaggtggagacggtgctgatcgagaccaccgcggacaacatcatccaggcaggaaataacctgctcattgttcagagccctggtgggggccagccagctgtggtccagcaggtccaggtggtgccccccaaggccgagcagcagcaggtggtacagatcccccagcaggctctgcgggtggtgcaggcggcatctgccaccctccccactgtaccccagaagccctcccagaactttcagatccaggcagctgagccgacacctactcaggtctacatccgcacgccttccggtgaggtgcagacagtccttgtccaggacagccccccagcaacagctgcagccacctctaacaccacctgtagcagccctgcatcccgtgctccccatctgagtgggaccagcaaaaagcactcagctgcaattctccgaaaagagcgtcccctgccaaagattgccccagccgggagcatcatcagcctgaatgcagcccagttggcggcagctgcccaggcaatgcagaccatcaacatcaatggtgtccaggtccagggcgtgcctgtcaccatcaccaacacaggcgggcagcagcagctgacagtgcagaatgtttctgggaacaacctgaccatcagtgggctgagccccacccagatccagctgcaaatggaacaagccctggccggagagacccagcccggggagaagcggcgccgcatggcctgcacgtgtcccaactgcaaggatggggagaagaggtctggagagcagggcaagaagaagcacgtgtgccacatccccgactgtggcaagacgttccgtaagacgtccttgctgcgtgcccatgtgcgcctgcacactggcgagcggccctttgtctgcaactggttcttctgtgggaagaggttcacacggagtgacgagctccaacggcatgctcgcacccacacaggggacaaacgcttcgagtgcgcccagtgtcagaagcgcttcatgaggagtgaccacctcaccaagcattacaagacccacctggtcacgaagaacttgtaaggccaactgcggcgggaggccctgaagatgcagtcccccacctgtgtcctccctgggcccctggtggaaaggagccctgtggctgccttgggcctgccctcagccccactcctgttctgcaactgtccccacaggaaggggctctgttccctgtattgtcctccttctgaagccccttggctctgccttggcccttcccctcaccacgagctcccggcctgcccagactgtggacactggccgtgcccaatgagacgttctaaaccaggacgcgtgggaacccttatttccaaaggaaaaacatgcatttcactccgtcgaggagcaaagtgagcccctaccccccaccccgatccccgctcccaacactgccggagtcgcgtcatgccatgccccctctcctgcacctccctggccctgccggccactgtggacgccctggggcttggcacccacctctggagaaactcggggccacctccactccatgtgcccagccccgccacaacctctcctccagcacattccagctctatttaaaaagtaaagacacccaccgactcctgatccccctctttttctatggagaacgttgccttatactctacttcagatgatgaacactgtgtactgtgtgtgctttaaagaagttttatttaattgctcccttcttcctttccttgttattcacctccctgatgcctgctttcagttgagggttgggggcaatgatgagcatatgaattttttctcactctagcaattcccttttctaaatgacacagcatttaaactcaaatctggattcagataacagcacctgcacatcctgcacctcctccctctcccttcacctcacccctgcccggcccaagctctacttgtgtacagtgtatattgtataatagacaattgtgtctactacatgtttaaaaacacattgcttgttatttttgaggcttttaaattaaacaaaaatccaactttatttttagttgtaactgcttgaggtatgttttatgaattaagtgacagatttgttatcctttattaacgtactttgttggtcagcactgggctgacaaaaattttttcttgctaataaatttagttgcctgaggcaaaatcttcaaaaaaaaaaaaaaaaaaaaaa

SEQ ID NO: 954 - DNA, 3548 bp, Homo sapiens
agccggggcccccgccgccgccggagcgacaggtgatttggcttctgcacagttaggaggagcaccaaaccgatgggaggttttgtcagccacacctacaactataaaagatgaagctggtaatctagtccagattccaagtgctgctacttcaagtgggcagtatgttcttccccttcagaatttgcagaatcaacaaatattttccgttgcaccaggatcagattcatcaaatggtgcagtgtccagtgttcaatatcaagtgataccacagatccagtcagcagatggtcagcaggttcaaattggtttcacaggctcttcagataatgggggtataaatcaagaaagcagtcaaattcagatcattcctggctctaatcaaaccttacttgcctctggaacaccttctgctaacatccagaatctcataccacagactggtcaagtccaggttcagggagttgcaattggtggttcatcttttcctggtcaaacccaagtagttgctaatgtgcctcttggtctgccaggaaatattacgtttgtaccaatcaatagtgtcgatctagattctttgggactctcgggcagttctcagacaatgactgcaggcattaatgccgacggacatttgataaacacaggacaagctatggatagttcagacaattcagaaaggactggtgagcgggtttctcctgatattaatgaaactaatactgatacagatttatttgtgccaacatcctcttcatcacagttgcctgttacgatagatagtacaggtatattacaacaaaacacaaatagcttgactacatctagtgggcaggttcattcttcagatcttcagggaaattatatccagtcgcctgtttctgaagagacacaggcacagaatattcaggtttctacagcacagcctgttgtacagcatctacaacttcaagagtctcagcagccaaccagtcaagcccaaattgtgcaaggtattacaccacagacaatccatggtgtgcaagccagtggtcaaaatatatcacaacaggctttgcaaaatcttcagttgcagctgaatcctggaacctttttaattcaggcacagacagtgaccccttctggacaggtaacttggcaaacgtttcaagtacaaggggtccagaacttgcagaatttgcaaatacagaatactgctgcccaacaaataactctgacgcctgttcaaaccctcacacttggtcaagttgcggcaggtggagccttcacttcaactccagttagtctaagcactggtcagttgccaaatctacaaacagttacagtgaactctatagattctgctggtatacagctacatccaggagagaatgctgacagtcctgcagatattaggatcaaggaagaagaacctgatcctgaagagtggcagctcagtggtgattctaccttgaataccaatgacctaacacacttaagagtacaggtggtagatgaagaaggggaccaacaacatcaagaaggaaaaagacttcggagggtagcttgcacctgtcccaactgtaaagaaggtggtggaagaggtaccaatcttgggaaaaagaagcaacacatttgtcatataccaggatgtggtaaagtctatgggaagacctcacatctgagagctcatctgcgttggcattctggagaacgcccttttgtttgtaactggatgtactgtggtaaaagatttactcgaagtgatgaattacagaggcacagaagaacacatacaggtgagaagaaatttgtttgtccagaatgttcaaaacgctttatgagaagtgaccaccttgccaaacatattaaaacacaccagaataaaaaaggtattcactctagcagtacagtgctggcatctgtggaagctgcgcgagatgatactttgattactgcaggaggaacaacgcttatccttgcaaagattcaacaaggttctgtttcagggataggaactgttaatacttccgccaccagcaatcaagatatccttaccaacactgaaatacctttacagcttgtcacagtttctggaaatgagacaatggagtaaatattacacaaatacttattcattgtggttatttttatacagtagtgagaagaatattgttcctaagttcttagatatctttttattgatgtgcaaaaatttttggattgacagtaacttggttatacatgacactgaaatgccttactttgtatgatattccatagtatattaaaaatggtaaaattgcatgggttttgtaggtacttttggaatctagaagaaatgaaattttaccaagttatataaagagaaaattgaatttaacaatgcgaatggtagtctaaccaaatgcatcaatcctgtgtggtttagtgtaaaaatgagaacatgttggtatttatctattgtaagataaaaaagctggtgggtgaaagaaatcatgttatgataaaaaattttgtaattttcttgatgactggaatttttattatgcataactgacaaatcaagtttccaagcaaatgttacatagtgtaggctttacttagcttatcaatttgtcattttgaagctaattattttaattaggttaactatgtacaatattttaagcattactcttgtaagattttgaaaactacattttaacatggaactctagggatagtcaccttttaaatcctgttgaaaagccatgtttaagatttaatttgccaaaataatgtcttgttaatattctttcaataacgaagttgggcaatataaccaatgtttaaaaaagtttaaaatgtataagttgaggcatttgggtggtaagagaatgttatagtgaattatcccttttcttgactattggaggaccaaaaaataaggtgtattgcgtcttagcagtgattttatccaatcttgtttccaaaaaccatggtctcccagggccttaaaagccatcatgtaaattaccagtaaagtgtaacatatgcaaacataacaaaatcacttccatagtgacgatactccaaccatatggatattagtcatagaagaactagaggttttatgatatttttttaagtcttttttttttgtctaggtagtcagtctgcacttaaatatcaatcattttccttttttgcttcttcccttaaaatttatatgtatccagtacatttaattgagaagcgtatgttttttattatgctgtattttctttttattttttaattattgtttatattttcaattcaaaaatgtacaaaataaagttacattgctggtctgtgtaagagctatacagttttcctaaatgtatacctgtaactgcagcagttcacctatttgcaaaaatttggaattctgttcatttgttattcttaagaccacctcaaatttaaaggctaccttattgtacgtttaaagtgtattataacagtgtggtagttaataaaacactatttttttttcttttgaaaaaaaaaaaaaaaaaaaaaaaaaaaaaaaaaaaaaaaaaaaa

SEQ ID NO: 955 - DNA, 5811 bp, Homo sapiens
agctgctacgccacagcccagcggcggccattcgcggaaaaagaggcagagcctgtgccagctacagcctcctccgagccaccgcgggcgggcgggaccggcctctcctcccgcctcgcccccacccccacccacctctatcccagtgtctccgtctgagggtttgtcctgttaatgcgggatgagcgatcagaagaaggaggaggaggaggaggcggcagcggcagcggcgatggctacagaaggagggaaaacctctgagccagagaataacaataaaaaacccaaaacctcaggctcccaggactctcagccctctcctctggctttactggcagctacttgcagcaaaatagggactcctggtgaaaatcaagcaactggacaacaacaaattattatagatccaagtcaaggattggtgcaacttcaaaatcaaccacaacagctagaactggtaacaacgcaacttgctggaaacgcttggcaacttgttgcctccactcctcctgcttcaaaagagaataacgtttctcaaccagcctctagttcgtctagttcttccagcagtaataacgggagtgcatctcctacaaaaactaaatcaggtaattcttccacccctggtcaatttcaagtcatacaagtacaaaatccaagtggtagtgtacagtaccaagtaattccacaacttcagacagtggaaggtcaacaaattcaaatcaatccaactagtagttcatctctacaggatttgcagggtcaaattcagctcatttctgcaggtaataatcaagctatactcacagctgctaacaggacagcttctgggaatattcttgctcaaaacctggcaaatcagacagttccggtccaaattagacctggtgtttcaataccactgcagttacagactcttcctggtactcaggctcaagttgtaacaaccctaccaattaacattggaggagtgactctagctttgccagtgataaacaacgtggctgccggaggagggactgggcaggttggccagcctgctgctactgctgatagtgggacttccaatgggaatcaattagtttccacacccaccaacaccactacttctgccagtactatgccagaatctccctcctcctccactacctgcacaaccactgcttcaacgtctttgacaagcagtgacacattagtgagctcagcagatactggccagtatgcaagcacatcagccagtagttctgaacgcaccattgaagaatctcaaacacctgctgctactgagtctgaagcccagagctccagtcagcttcagcctaatggaatgcagaatgcacaggatcaatcaaattctcttcagcaggtgcaaattgtaggccaacctatcttacagcagatccagatccaacagcctcagcaacagatcattcaggctattccaccacagtcgtttcaactccagtcagggcagacgattcagaccatccagcagcagcctttacagaatgttcaacttcaagcagtaaatccgactcaggtgcttatcagggctccaactttaacaccttcagggcaaatcagttggcaaactgtacaggttcagaatattcagagtctttcaaatttgcaagttcagaatgctgggttatcccaacaattaaccatcaccccagtgtcttcaagtggtggcacaactcttgctcagattgctcctgtggctgttgctggtgccccaataactttgaatactgcccagcttgcatcagtgcctaaccttcagacagtgagcgttgccaacctgggtgctgcaggtgttcaagtgcagggagttcccgttacaatcactagtgttgcaggtcagcagcaaggacaagatggagtaaaagtccagcaagctactatagctcctgtaactgtagcagttggaggaattgctaatgccacgataggtgctgttagtcctgaccaactcacacaagtgcatttgcagcaaggccagcagacttctgatcaagaggtacaacctggcaagaggcttcgaagagttgcctgttcctgtcctaattgtagggaaggagaaggaagaggcagtaatgaaccaggaaaaaagaagcagcatatctgtcatattgaaggatgtggtaaagtttatggcaaaacatctcatttacgagcacatcttcgctggcatactggagaaagaccttttatatgcaactggatgttttgtggcaaaagattcacacggagtgatgagctccagagacatagaagaacccatacaggtgaaaagagatttgaatgcccggaatgttctaaaaggtttatgcggagtgatcatctctccaaacatgtcaaaacgcaccagaataaaaaaggtggtgggacagctcttgccattgttacctcgggagaactggactcatctgttacagaggtgcttggctccccaagaattgtcacagttgcagccatttctcaagattcgaatccagcaactcccaatgtttcaaccaacatggaagaattctgaaaagttatttataacagagacctctagtgctgcacttgtttacacacctttgaaaatctggaaatgggctggtcaagtggattacagagtaggaaattatgttttcattcttggcttctttaagtattccagggtttggggtcaacacgtgaagtgttgaattttaaaaaatacaaaaagcagactgatgtactggaaacagaaaagtatttcctccatactataagttgtagttgtttggaaatatatcacataacctttatacagaatcttcccatctcttaatatcatgtgttaacatgtttaaaaagaccttagtagtttgcaggctggaccttaattggacttattttctttgaaagtactttgttataaattcagtcagtaataatttacgtgtattctttttctctatagcacagaaaacagatagttaactgatgatagggataatactgtatttccttagcttgatttttggaaaatcaaccgaaaatagtttggccgtcttttctaaatgttagaaattcttcaacagttgaattaggtaagttccaaaacagtaatctgagatgcatctcagatctttattaccactacattatagtagtgtgtatgcagacaatcagtgaagtccaattactttctccatttggagacacaagaggaacatagagttaaatcttaggttaaattttaggttgacaccttaggaaaatgctgggaaaaaaatggttaaaacaaaactcatcatagcttcagaaaaataaaatgaggcatcttaacatgcaatgttctaaagttaggattgattatattcctaaccctaggttgaaccacaaaatttcatttaaaatgtttatatttggaaatatttgcatagagtgtaaattgttctgtagtttcatattttgtaaatatgagttatgttgacaatgtgcagaattctttatgctttgatgtggtagccaaagaaagaattacacttttttccaaggccagcagaaaattctcttttaactacattgtaattcttgttttcctctactaaaaattggccagtcccattttatttctagtgctatgtaagaaggtaattaggaattataacacagtaatgtttttatgttacatcaataactgaattttccctaaaaattagcctaatatataatagatatattatgaagcaaaacttttatttttgaaaaggcagaataattttcagtgaagtaagtgactaaagaaaaaaactatattattgtttatgcaagggtcttacaggaaagggtctttttttttttttttttgagatggagtctcgctctcttgcccaggctggagtgcaatggcacgatctcagcttactgcaaccgccgcctcccaggttcaagcgattctcctgtcttagcctcctgagtagctgggattaacaggcgcctgccaccatgcctggctaatttttgtatttttagtagagacagggtttcgccatgttggccaggctggtttcaaactcctgacctcaggtgatctgcccacctcggcctcccagagtgctgggattacaggcatgagccaccatgcccggctaggaaagggtcttactaggaaagatggccaaaagtttcatatgaaaaaaattggattataaaccagtaacttaaatattaataaggatattttatgttttaaaaaagtatttacacagaatcataatcagtgaaattgaccatttgaaaactaaaagtttttacctacctgctcaatttattaacatcattgctttggggactgtttgaatataggtacgtgttttcttgtgcattctctataatttcaggaaaagtactaatgcgaattctcttccaaaattgtgatgtttcttgtatttttgatgaaggagaaatactgtaatgatcactgtttacactatgtacactttaggccagccctttgtagcgttatataaaactgaaggtcttttgtgctttcagtttgtataaaaaagctttgagattaaaggaaaaaaaaaatttttacactgtggttataaatttcaagtttcttaaagcttttgtagacttgtaacagagtctttaaatttaagttggattttgtaaattgttttgtatattttatttaatgtactcttaacaactgatgtatctggctttaaaacatcagaattggtttgttgttttgtttggtacagaggagcatttggtagtgttcattttaattttattatataggagctgaaacatcaaatatatattttatctatcattatgctacacaatcagtgctataaatttttttatgcaaagaaactttcttaatgttttaatcatgtttcctcagagtgacactttttgttgttgttaataccaagtatgaacactctgcatcattattccatgaaccagttctaatgcaaacctatgtatgtccattagaaatggaagttattttttaatcaacaatgaggcctattataaatttatcagatgaatctagatagctttatagcatataaaatatgttaatttgtgttagcaggtgcacatttcaccactgaaattagaaatattttgacagtctgttctgcataccattctgagtctacttttctgtctttagaagaatcgtaaatttcagtgtcctttatttgactcagtgggatatagctgttataagtaatagggcacagatgtgcagtagagtcttgtttaatggcatttcactgttcattccctttaccaccgttataaaacttttctttattgtaattatcagtgcaaagctatgtatttatcatggtaaaactccagtgttagaatagttttttcttacagtatactttctttggttaggtttgtgtatgtgttgctgattacattagaacttgatgttaagtcatttatcacactctcatgagagcagtaataaaagtgtgtaatctaggagaaaaagttaatttgtcaaacttagataagcatgatgtttaggtcctatttttcaattttataactgttttattgcaacaatatttgtatttaagtctccattttaatgccttgtggtgtttttttatgcatgtcactaagttgtcatcccacataaattgatgtgcagcatagggtattaaatctacataatgattttaaaacagaaatagttgatggtaaaatgtaaatgttttgcaaaaattccttataaaaagttttgtagtaacatttcacttgtaaattttttttgtaaaaaaaaaaaaa

SEQ ID NO: 956 - DNA, 2995 bp, Homo sapiens
ttctcccattctccctccctctcccttttctctctctaccccccccaccccccggctcagctctctccatctgcctggctccttgggacccgttccccagcctcaggatggcgtcctccctgcttgaggaggaagttcactatggctccagtcccctggccatgctgacggcagcgtgcagcaaatttggtggctctagccctctgcgggactcaacaactctgggcaaagcaggcacaaagaagccgtactctgtgggcagtgacctttcagcctccaaaaccatgggggatgcttatccagccccctttacaagcactaatgggctcctttcacctgcaggcagtcctccagcacccacctcaggctatgctaatgattaccctcccttttcccactcattccctgggcccacaggcacccaggaccctgggctactagtgcccaaggggcacagctcttctgactgtctgcccagtgtctacacctctctggacatgacacacccctatggctcctggtacaaggcaggcatccatgcaggcatttcaccaggcccaggcaacactcctactccatggtgggatatgcaccctggaggcaactggctaggtggtgggcagggccagggtgatgggctgcaagggacactgcccacaggtccagctcagcctccactgaacccccagctgcccacctacccatctgactttgctccccttaatccagccccctacccagctccccacctcttgcaaccagggccccagcatgtcttgccccaagatgtctataaacccaaggcagtgggaaatagtgggcagctagaagggagtggtggagccaaacccccacggggtgcaagcactgggggtagtggtggatatgggggcagtggggcagggcgctcctcctgcgactgccctaattgccaggagctagagcggctgggagcagcagcggctgggctgcggaagaagcccatccacagctgccacatccctggctgcggcaaggtgtatggcaaggcttcgcacctgaaggcccacttgcgctggcacacaggcgagaggcccttcgtctgcaactggctcttctgcggcaagaggttcactcgttcggatgagctggagcgtcatgtgcgcactcacacccgggagaagaagttcacctgcctgctctgctccaagcgctttacccgaagcgaccacctgagcaaacaccagcgcacccatggagaaccaggcccgggtccccctcccagtggccccaaggagctgggggagggccgcagcacgggggaagaggaggccagtcagacgccccgaccttctgcctcgccagcaaccccagagaaagcccctggaggcagccctgagcagagcaacttgctggagatctgagccgggtggaaggtctcccaccccagggctgccctgacagtctctcttggctctctagaccactgcttgccaatcactctctttaccccatgcatgccatccttcggggctctctccctctgtctccctcctggccattctgggcttgggtatctccttgcatgcctcctcagctcaccttctctcttcaccatgagactggctttccacaaactctcatctcaggccctccccttgtgcctgatacctgcactccggcttcctagactctggccctgccacaccaacacactttctatttgggctcccaacactatttctccatctcactccttgacatgtacccctttctgcttctcaagcttatttcctgctgtccctcagcctccaggcttcagtcttcccaacttcttacaccattgctttccattctccagaactcttttttcctttttacaaacacaatgataatgataatttattgccccctggtggcctcttcatcaggggtattggggttagtgacctggccagagggtgccaagaggggggcagaccagtggggatctgatcccaaagatggggtgaccccagggtcagggaggctgcccccaggcctgtatatttaacccctatgtaccaggagtaatgaatagtaataattctatttatgtaagttatgatgacgggtcaggtagagtgagctggggagggaagtggatccatttctgctaaggaaattctagtcaaatgcatctctgtatagacaaaatgttagtggagaagatcttgttaatagaatgtctatcatcagaatctcagttgatagggtttctcttgtaatgaagtctctacaaattgggttagctacatctctgctaaacagttgatggggtatctcttgattagggggatccctaatatccccagccccagccagaagctgtgaaacctcaagtcctatggaggggagaaggactggaatgtaccccatctcccttgactgcagagcaggttcctccactgccccaccccttagacaccatgaccccatcaggttaatcccctgttgccatggttatggagagcttgcagctgccatcttagatgtgctctttggggaagcccatctaacaggaggacattggtttgggggtgcacctcctgaagaatgggtggggaaggctttctctaggatcagattcaaataagtatgtattgagtgcctactctgtgcaaggcactatgctagatctggtgcctagaagccctgagaaagaacttaaagagctaggaggacagaggcccccaagctgatctggtggtgcatccacgcacccccaccctgggactttggatgctcccatctccacctccagtgacttttaaagccgcttcgtgcctttcctgtaacgttggatcctccttttctgtcccctgctgtctcaaggccccaagttaaagggttaaagccgctggagcttggggagagaacattgtggaatggaagggatcatgccctttgtggagtcttttttttttaatttaataaataaaagttggatttgaaaaaaaaaaaaaaaaaaaaaaaa

SEQ ID NO: 957 - DNA, 1423 bp, Homo sapiens
gactatctcccagcggcaggcccttcgataaaatcaggaacttgtgctggccctgcaatgtcaagggagggggctcacccagggctcctgtagctcagggggcaggcctgagccctgcacccgccccacgaccgtccagcccctgacggggcaccccatcctgaggggctctgcattggcccccaccgaggcaggggatctgaccgactcggagcccggctggatgttacaggcgtgcaaaatggaagggtttcccctcgtcccccctccatcagaagacctggtgccctatgacacggatctataccaacgccaaacgcacgagtattacccctatctcagcagtgatggggagagccatagcgaccattactgggacttccacccccaccacgtgcacagcgagttcgagagcttcgccgagaacaacttcacggagctccagagcgtgcagcccccgcagctgcagcagctctaccgccacatggagctggagcagatgcacgtcctcgatacccccatggtgccaccccatcccagtcttggccaccaggtctcctacctgccccggatgtgcctccagtacccatccctgtccccagcccagcccagctcagatgaggaggagggcgagcggcagagccccccactggaggtgtctgacggcgaggcggatggcctggagcccgggcctgggctcctgcctggggagacaggcagcaagaagaagatccgcctgtaccagttcctgttggacctgctccgcagcggcgacatgaaggacagcatctggtgggtggacaaggacaagggcaccttccagttctcgtccaagcacaaggaggcgctggcgcaccgctggggcatccagaagggcaaccgcaagaagatgacctaccagaagatggcgcgcgcgctgcgcaactacggcaagacgggcgaggtcaagaaggtgaagaagaagctcacctaccagttcagcggcgaagtgctgggccgcgggggcctggccgagcggcgccacccgccccactgagcccgcagcccccgccgggccccgccaggcctccccgctggccatagcattaagccctcgcccggcccggacacagggaggacgctcccggggcccagaggcaggactgtggcgggccgggcctcgcctcacccgccccctccccccactccaggccccctccacatcccgcttcgcctccctccaggactccaccccggctcccggacgccagctgggcgtcagaccccaccggggcaaccttgcagaggacgacccggggtactgccttgggagtctcaagtccgtatgtaaatcagatctcccctctcacccctcccacccattaacctcctcccaaaaaacaagtaaagttattctcaatccatcaaaaaaaaaaaaaaaaaa

SEQ ID NO: 958 - DNA, 1493 bp, Homo sapiens
ggcaaacagcccgcccggcaccaccatgctcgccctggaggctgcacagctcgacgggccacacttcagctgtctgtacccagatggcgtcttctatgacctggacagctgcaagcattccagctaccctgattcagagggggctcctgactccctgtgggactggactgtggccccacctgtcccagccaccccctatgaagccttcgacccggcagcagccgcttttagccacccccaggctgcccagctctgctacgaaccccccacctacagccctgcagggaacctcgaactggcccccagcctggaggccccggggcctggcctccccgcataccccacggagaacttcgctagccagaccctggttcccccggcatatgccccgtaccccagccctgtgctatcagaggaggaagacttaccgttggacagccctgccctggaggtctcggacagcgagtcggatgaggccctcgtggctggccccgaggggaagggatccgaggcagggactcgcaagaagctgcgcctgtaccagttcctgctggggctactgacgcgcggggacatgcgtgagtgcgtgtggtgggtggagccaggcgccggcgtcttccagttctcctccaagcacaaggaactcctggcgcgccgctggggccagcagaaggggaaccgcaagcgcatgacctaccagaagctggcgcgcgccctccgaaactacgccaagaccggcgagatccgcaaggtcaagcgcaagctcacctaccagttcgacagcgcgctgctgcctgcagtccgccgggcctgagcacacccgaggctcccacctgcggagccgctgggggacctcacgtcccagccaggatccccctggaagaaaaagggcgtccccacactctaggtgataggacttacgcatccccaccttttggggtaaggggagtgctgccctgccataatccccaagcccagcccgggcctgtctgggattccccacttgtgcctggggtccctctgggatttctttgtcatgtacagactccctgggatcctcatgttttgggtgacaggacctatggaccactatactcggggaggcagggtagcagttcttccagaatcccaagagcttctctgggattttcttgtgatatctgattccccagtgaggcctgggacgtttttaagatcgctgtgtgtctgtaaaccctgaatctcatctggggtgggggccctgctggcaaccctgagccctgtccaaggttccctcttgtcagatctgagatttcctagttatgtctggggccctctgggagctgttatcatctcagatctcttcgcccatctatggctgtgttgtcacatctgtcccctcatttttgagatcccccaattctctggaactattctgctgcccctttttatgtgtctggagttccccaatcacatctagggctcctccaagaaaaaaaaaaaaaaaaaaaaaa

SEQ ID NO: 959 - DNA, 1116 bp, Homo sapiens
cagaattgtcaatttattaatgaaatatgacgtgtgttgaacaagacaagctgggtcaagcatttgaagatgcttttgaggttctgaggcaacattcaactggagatcttcagtactcgccagattacagaaattacctggctttaatcaaccatcgtcctcatgtcaaaggaaattccagctgctatggagtgttgcctacagaggagcctgtctataattggagaacggtaattaacagtgctgcggacttctattttgaaggaaatattcatcaatctctgcagaacataactgaaaaccagctggtacaacccactcttctccagcaaaaggggggaaaaggcaggaagaagctccgactgtttgaataccttcacgaatccctgtataatccggagatggcatcttgtattcagtgggtagataaaaccaaaggcatctttcagtttgtatcaaaaaacaaagaaaaacttgccgagctttgggggaaaagaaaaggcaacaggaagaccatgacttaccagaaaatggccagggcactcagaaattacggaagaagtggggaaattaccaaaatccggaggaagctgacttaccagttcagtgaggccattctccaaagactctctccatcctatttcctggggaaagagatcttctattcacagtgtgttcaacctgatcaagaatatctcagtttaaataactggaatgcaaattataattatacatatgccaattaccatgagctaaatcaccatgattgctaaatatactttcatatttcatggtttactggcatcggaaatctctacaagttttaatgatttctccctccctctctttttttcctcctctgaagaaatttaggatttttctcttaaagcaaatactaaagaggaaaaaaaattaactttattgttgcttttatcaaagagtatgtaatctatactaacttgttgggaaattctgccaatgaacaacttttttataataaaaaaaaaaaaaaaaaaaaaaaaaaaaaaaaaaaaaaaaaaaaaaaaaaaaaaaaaaaaaaaaaaaaaaaaaaaaaaaaaaaaaaaaaaaaaaaaaaaaaaaaaaaaaaaaaaaaaa

SEQ ID NO: 960 - DNA, 918 bp, Homo sapiens
tcctttggtgccttgtgaccagggccctgatggttcattagatggagccttcgagtcttagggagttgccgcagggtccccacagcggctcccgacggttgtgaaccagcatccatcctccacggattccggcaacccgcctggccctggacgtgtctcaactggcccgcgtgaggggccgccccggaaatgacgcgctgccccgctggccaagcggaagtggagatggcggagctgtacgtgaagccgggcaacaaggaacgcggctggaacgacccgccgcagttctcatacgggctgcagacccaggccggcggacccaggcgctcgctgcttaccaagagggtagccgcaccccaggatggatcccccagagtccccgcatcagagacttctcctgggcctcccccaatggggcctccacctccttcaagtaaggctcccaggtccccacctgtggggagtggtcctgcctctggcgtggagcccacaagtttcccagtcgagtctgaggctgtgatggaggatgtgctgagacctttggaacaggcattggaagactgccgtggccacacaaggaagcaggtatgtgatgacatcagccgacgcctggcactgctgcaggaacagtgggctggaggaaagttgtcaatacctgtaaagaagagaatggctctactggtgcaagagctttcaagccaccggtgggacgcagcagatgacatccaccgctccctcatggttgaccatgtgactgaggtcagtcagtggatggtaggagttaaaagattaattgcagaaaagaggagtctgttttcagaggaggcagccaatgaagagaaatctgcagccacagctgagaagaaccataccataccaggcttccagcaggcttcataatcctcggttccccagact

SEQ ID NO: 961 - DNA, 10491 bp, Homo sapiens
aacttgggcagaggtcaggggtcacgcgaggtcagtccgtcgggagggctagggagatggtcacgaaacctgaagtcaagagttaaggcttgttggcttctggtgtgattcccttcagtacggcggcaccgtggaagtgcagactttcacagggggtgtggtctcagctcacacaggtgctccagaggctggtggacctgagcggaggctgggacgccctggtgggccccgggccctggaaggcgggtcccggtggccggtggcccagaatgaggccagctcccagcatgccctgcagccggacgccagcccctcggccagcagtactggtgataacaacccagtcattcttcaggcatccaagggggagcctgggagtgggaccatgcagagcagcccctcccctgctcaccctcagctcccagtcctacagacacagatggtgtcggacggcatgacaggcagcaatcctgtgtcccctgcctcatccagttccccagcctctagtggggcaggcggcatctccccgcagcacatagctcaagattcctcactggatggacctccaggccccccagatggtgccacagtgcccctggaggggttcagcttatcccaggctgctgacctggctaacaagggcccgaagtgggagaagagccatgccgaaattgcagaacaggccaagcatgaggccgagatcgagactcggattgctgagctgcggaaggagggtttctggtcactgaagaggctgcctaaggtgccagagccccctcgccccaaaggtcactgggactatttgtgcgaagagatgcagtggctctctgctgactttgctcaggagcgccgttggaaacggggtgtggcccggaaggtggtgcgcatggtgatccggcaccacgaggagcagcggcagaaagaggaacgggcccggagggaggagcaggccaagctgcgtcgaattgcttccaccatggccaaggatgtcaggcagttctggagcaatgtggagaaggtggtgcaattcaagcaacagtcccggcttgaggaaaagcgcaaaaaagccctggacctgcatttggacttcattgtggggcaaactgaaaagtactcggaccttctgtctcagagcctcaaccagccattaacctccagcaaagcaggctcttccccttgcctcggctcttcctcagctgcctccagtcctccaccccctgcttctcgcctggatgatgaagatggggactttcaaccccaagaggatgaggaagaggatgatgaggaaacgattgaagttgaagaacaacaggaaggcaatgatgcagaggcccagaggcgtgagattgagctgcttcgccgtgagggagaattgccactggaagagctgctccgttcccttccccctcagctgttggaagggccttccagcccctctcaaaccccctcatctcatgatagtgacacccgagatgggcctgaagaaggtgctgaagaagagccccctcaggtgttggagataaagcccccaccctctgctgtcacacagcgcaacaaacagccttggcatccagatgaagatgatgaagagtttactgccaacgaagaggaagcggaggatgaagaggatactatagcagctgaggaacagttggaaggggaggtggatcatgccatggagctgagcgagttggctcgagaaggtgagctttccatggaggagctattgcagcagtatgcaggagcctatgccccaggctctgggagcagtgaagatgaggatgaagatgaggttgatgctaatagctctgactgtgaaccagaggggcccgtggaagcggaagagcctcctcaggaggatagtagcagtcagtcagactctgtggaggaccggagtgaggatgaggaagatgaacattcagaggaggaagaaacaagtggaagttcagcatcagaggaatctgagtctgaagagtctgaggatgcccaatcacagagccaagcagatgaagaggaggaagatgatgattttggggtggagtacttgcttgccagggatgaagagcagagtgaggcagatgcaggcagtgggcctcctactccagggcccactactctaggtccaaagaaagaaattactgacattgctgcagcagctgaaagtctccagcccaagggttacacgctggccacgacccaggtaaagacgcccattcccctgcttctgcggggccagctccgggagtaccagcacattgggctagactggctggttaccatgtatgagaagaagcttaatggcattcttgctgatgagatggggcttgggaagaccatccagaccatctctctgcttgcccacttggcttgtgagaaaggtaactggggtccccatttaatcattgttcccaccagcgtgatgttgaactgggagatggagttgaaacgttggtgccccagctttaaaatcctcacttactatggagcccagaaagagaggaagctcaagcggcagggctggaccaagcccaatgcctttcatgtgtgtatcacatcttacaagctggtgctgcaggaccaccaggccttccgtcgcaagaactggcgctatctcattctggatgaggcgcagaacatcaagaacttcaagtcacagcgctggcagtcactcctcaacttcaacagccagagacgcctgctcctgacaggaactcccttgcagaacagcctcatggagctgtggtccttgatgcactttttgatgccccatgtcttccagtctcatcgcgagttcaaggagtggttctctaatcccctaactggcatgattgagggcagccaagagtataatgaaggtctagtcaaacgcctccacaaggttttgaggccttttttactgcgccgagttaaggtggatgttgagaagcagatgcccaaaaagtacgagcatgttatccgctgcaggctctccaagcgtcaacgctgtctctatgatgacttcatggcacagaccacaactaaggagacactagccacaggccatttcatgagcgtcatcaacattttgatgcagctgagaaaagtttgcaatcatccaaatctgttcgaccctcgaccggttacctcccctttcatcaccccaggcatctgcttcagcaccgcctctctggtgctaagggccacggatgtccatcccctccagcggatagacatgggtcgatttgaccttattggcctggaaggtcgtgtctctcgatatgaggcagacacatttctgccccggcaccgcctctctcgccgggtactgttagaagtggctactgctcctgaccccccaccccggcccaagccagtcaagatgaaggtcaacaggatgctgcagccagtacctaagcaagaaggccggacagtggtggtggtgaacaacccacgggcgcccctgggccctgtcccagttcgacctcctccaggtcctgagctctcagcccagcccacccctggcccagtcccccaagtgctgccagcatcactgatggtttcagcctcacctgccgggcccccgcttattcctgcatctcggcctcctggccctgtcctcttgcctccactgcagcccaacagtggttctctcccccaggtgttgccatcccccctgggggtcctgagtgggacctcacggcctcccacgccaaccttgtccctaaagccaacaccacctgccccagttcgcctgagcccagccccacctccaggctcctctagcctgttgaagcccctgacagtgccaccaggctacaccttccctcctgctgctgccaccaccacttctaccaccacggcaactgctaccaccacagcagtgccagctccgactcctgcaccacagcgcctcattctatctcccgatatgcaggctcgcctgccctcaggcgaagtggtcagcatcgggcagttagcctcactggcacaacgtccagtggctaatgcagggggaagcaaacctctcaccttccaaatccagggcaacaagctgactttgactggtgcccaggtgcgccagcttgctgtggggcagccccgcccgctgcaaaggaatgtggtgcacctcgtgtcagcaggggggcagcaccatctcatcagccagcctgcccatgtggccctcatccaggccgtggccccgacccctggccctacccctgtctctgtgctgccttcttcgacccccagcaccacccctgcccctactggcctcagccttccgcttgctgctaaccaggtgccaccaaccatggtgaataatacaggcgtggtgaagattgtagtgagacaagcccctcgggatggactgactcctgttcctccattggccccagcaccccggcctccgagctctgggcttccagctgtgttgaatccacgccccacgttaacccctggccggctacccacacctactctgggtactgctcgagcccccatgcccacacccactctggtgaggcctcttctcaagctggtccacagtccttcacctgaagtcagtgcttcagcccccggagctgcccccttgaccatctcttctcctctccacgtgccatcctcactccctgggccagcctcttctccaatgccaattcccaactcctctccccttgctagtcctgtgtcctctacagtctcagttccattgtcatcttcactccccatctctgtccccaccacacttcctgccccagcctcggctccactcaccatccccatctcagcccccttgactgtttctgcttcgggcccagctctgttgaccagtgtgactccaccattggcacctgttgtcccagcggctcctggacctccctccttggcaccatctggtgcttccccgtcagcatcagccttgactctaggtttggccacagctccatccctgtcttcatctcagacacctggtcaccctctgttgttggctcccacctcttcacatgttccagggttgaactcaaccgtggccccagcatgctcacctgtcctggtgccagcttcggctctggccagtccttttccgtcagcaccaaatccagctccagctcaggcttcccttctggctccagcatcttctgcatctcaggctctagccacccctctggctcctatggcggctccacagacagcaattctggctccttctccagctcctcctctggctcctcttccggtcctggcaccatcgccaggtgctgctcctgtcctggcttcatcacagactccggttccagttatggctccatcgtctactccaggaacctctttagcctcagcttcaccggtaccagctccaacccctgtgttggctccatcatcaactcaaactatgctaccagccccggttccgtcacctctcccgagcccggcttctacgcagacactggccctagccccagctttagcacccactcttggaggctcatctccatctcagacactctctttgggaacggggaacccccagggaccctttccaactcagacattgtcattaactccagcatcatccctggtaccaactccagcccagacactgtctttggcaccaggaccaccactgggtccaactcagacgctgtctctggctccagcaccccctctggctccagcttctccagtgggcccagccccagctcacacgctgactttggctccagcatcgtcatctgcttcactcctggccccagcttcagtgcagacactgaccttgagccctgccccagttcctaccctgggcccggccgcagctcagaccttggcgctggccccagcctccacacagtccccagcttcccaggcatcttcccttgtggtttcggcatctggtgccgctcccttgcctgtcaccatggtatcccggctgcctgtttccaaggatgagcctgacacactgacattgcgctctggtccccccagccctccctccactgctacctcgtttggtggcccccggcctcgacgccagccccccccaccacctcgttcccctttttatctggactccctggaggaaaagcggaagcggcagcggtctgaacgcctggaacggattttccaacttagtgaggctcatggggccctggcacctgtgtatgggactgaagtcctggatttctgtaccctgccccaacctgttgccagccccatcggccctcgttctcctggccccagccaccccaccttttggacttataccgaggctgcccaccgggctgtactgtttccccagcagcgactagaccagctgtcagaaatcattgagaggttcatctttgtcatgcctcctgtggaggcacctcccccttccctgcatgcctgccacccacctccttggctggccccacgtcaggcagccttccaggagcaattggcctctgagctctggccccgggctcgtcctttgcaccgtattgtgtgtaacatgcgcacccagttccctgacttaagactcatccagtatgattgcggaaagttgcagacgttggcagtgctgttgcggcagctcaaggcagagggccaccgagtgctcatcttcacccagatgacccgaatgctggatgtattggagcagtttctcacctaccatggccatctctacctgcgcctggatggatctactagagttgaacagagacaggccttgatggaacggttcaatgcagacaaacgcatattctgcttcatcctttcaactcggagtgggggtgtgggcgtgaacctgacaggagcagacactgttgttttttatgacagcgactggaatcccaccatggatgctcaggcccaggaccgctgtcaccgaattggccagacccgggatgtccacatatataggcttatcagtgaacggacagtggaggagaacatcctaaaaaaggcaaatcagaagagaatgttgggggacatggccattgagggaggcaacttcaccacagcctatttcaaacagcagaccatccgagagctgtttgatatgcccctggaggaaccttctagctcatccgtgccctctgcccctgaagaggaggaagagactgtggccagcaagcagactcatattctggagcaggcattgtgtcgggcagaagatgaagaggatatccgtgcagccacccaggccaaggctgaacaggtggctgagcttgcagaatttaatgagaacgatgggtttcctgctggtgagggagaggaagctggccggcctggggctgaggatgaggagatgtcccgggctgagcaggaaattgctgccctcgtagaacagctgacccccattgagcgctatgccatgaaattcctggaggcctcactggaggaggtgagccgagaggagctcaaacaggcagaagagcaagtggaagctgcccgcaaagacctggaccaagccaaggaggaggtgttccgcctaccccaagaggaggaggaggggccgggggctggggatgagagttcctgtgggactggtggaggcacccaccggcgcagtaaaaaggccaaagcccctgagaggccggggactcgtgtcagtgagcgtcttcgtggagcccgggctgagactcaaggggcaaaccacactcctgtcatatccgcccatcaaactcgcagcaccaccacaccaccccgctgcagtcctgccagggagcgagttcccaggccagcacctaggcctcgacccactccagcttcagctccggctgcaattcctgcccttgttcctgtcccagtttctgccccagtacccatttcagccccaaatccaataaccattctccctgtccatatcttgccttctcctccccctccttcacagattcctccttgttcttctcctgcctgcacccctcctcctgcctgtacccctccaccagctcatacaccgcctccagcccaaacctgtcttgtaactccttcctctcctctcttgcttggtccaccttctgtgcccatctctgcctcagtcactaatctccccttgggcttgaggcctgaggcagagctgtgtgcccaggcattggcatctccagagtccctggagctggcttctgtggccagttcagaaacctcctcactttctcttgtgccccctaaagatctgttgccagttgctgtggagatcctgcctgtgtcagagaagaacctttctctcaccccttctgcacccagcctgaccttggaggctggcagcatccccaatggtcaagagcaggaggcaccagattctgctgaggggaccacccttacagtgctgcctgaaggtgaggagttgcccctgtgtgtgagtgagagcaatggcctggagctcccaccctcagcagcatctgatgagccacttcaggagccactggaggctgacaggacctcggaagagctgacagaggccaagaccccaacctccagcccagagaagccacaggaactcgttacagctgaggttgcagctccatccacctcatcttcagccacttcctcgcctgagggtccttcacctgcccgacctcctcggcgtcgcaccagtgctgatgtggaaattaggggtcaagggactggtcggccaggacaaccaccaggccccaaagtgcttcgaaagctgccaggacggctggtaactgtggtagaggaaaaggaactggtgcggcggcggcggcagcagcggggagctgccagcaccctagtgcctggggtctctgagactagtgccagcccgggaagcccgtctgtccgcagcatgtcagggccagaatcctcccctcccattggtgggccctgtgaagctgctccttcatcctcactgcccactccaccccagcagcccttcattgctcgccgtcacattgagctgggggtgactggtggtggcagccccgagaatggagacggagcactgctcgccatcaccccacctgctgtgaaacgtcggagggggaggccccccaagaagaacaggtctccagcagatgctgggagaggtgtggatgaggcaccctcatccaccttgaagggaaaaaccaatggggctgacccagtccctgggcctgagaccctaattgttgcagatcctgtcctggaaccacagcttattcctgggccccagcctcttggaccccagccagttcacagacccaatcccctcctgtcacctgtggagaaaagaaggcgaggacgaccccctaaagcacgagatttgcccatccctgggaccatttcctctgcaggggatggcaactccgaaagtcggacacagccacccccacacccatcacccctaaccccactcccaccactgctagtttgtcccactgctactgttgccaacactgtcaccactgtcaccatttcaacgtccccacccaaacggaagaggggccgacctcccaagaatcctccatcacctcggcccagccagctccccgtcttggaccgtgacagcacttctgttctcgagagctgtggattggggaggcgacggcaaccccagggccaaggggagagtgagggtagttcctctgatgaggatggaagccgccccctcacccgcctggcccgccttcggcttgaagcagaaggaatgcgaggacggaagagtggagggtccatggtggtggctgtaattcaggatgacctggacttagcagatagcgggccaggcgggttggaattgacaccacctgtggtctcactaaccccaaaactgcgctcgacccggctgcgtccagggtctctagtccccccactagagactgagaagttgcctcgcaaacgagcaggggccccagttggtgggagtcctgggctggcaaagcggggccgcctacagcccccaagtcccctggggcctgagggttcagtagaggagtctgaggctgaagcctcaggtgaggaggaggaaggggatgggaccccacgccgacgtcctggcccccgccggcttgttgggaccaccaaccaaggggaccagcgcatcctgcgcagcagcgcccctccctccctggctggccctgctgttagtcacagaggccgcaaggccaagacgtgagtgggctgcccctccacctaggctttccaccgtggccactccctccatgaccaggcctgactctgttaaccactacttgaagtcttgagggggaaagcctccagggagacataggggccttctcccttcttcccaccaaagtagggggtaggcaactggttgtcatggaaatggggatcatcacagtccccttccccttcaccccacgtggctgggcagtgttaagggtggcaagatagtctctgtccccacccccttgtacttgattccccagctgtctttcacacagccccccacccttaggggaagggggaggggcttctctacaatgaggtttttttcttttttttttttttttaagaagaaaaaataataaacttagtttctgtatgagcaaaaaaaaaaaaaaaaaa

SEQ ID NO: 962 - DNA, 4922 bp, Homo sapiens
agcagagctgcggccgggggaacccagtttccgaggaacttttcgccggcgccgggccgcctctgaggccagggcaggacacgaacgcgcggagcggcggcggcgactgagagccggggccgcggcggcgctccctaggaagggccgtacgaggcggcgggcccggcgggcctcccggaggaggcggctgcgccatggacgagccacccttcagcgaggcggctttggagcaggcgctgggcgagccgtgcgatctggacgcggcgctgctgaccgacatcgaagacatgcttcagcttatcaacaaccaagacagtgacttccctggcctatttgacccaccctatgctgggagtggggcagggggcacagaccctgccagccccgataccagctccccaggcagcttgtctccacctcctgccacattgagctcctctcttgaagccttcctgagcgggccgcaggcagcgccctcacccctgtcccctccccagcctgcacccactccattgaagatgtacccgtccatgcccgctttctcccctgggcctggtatcaaggaagagtcagtgccactgagcatcctgcagacccccaccccacagcccctgccaggggccctcctgccacagagcttcccagccccagccccaccgcagttcagctccacccctgtgttaggctaccccagccctccgggaggcttctctacaggaagccctcccgggaacacccagcagccgctgcctggcctgccactggcttccccgccaggggtcccgcccgtctccttgcacacccaggtccagagtgtggtcccccagcagctactgacagtcacagctgcccccacggcagcccctgtaacgaccactgtgacctcgcagatccagcaggtcccggtcctgctgcagccccacttcatcaaggcagactcgctgcttctgacagccatgaagacagacggagccactgtgaaggcggcaggtctcagtcccctggtctctggcaccactgtgcagacagggcctttgccgaccctggtgagtggcggaaccatcttggcaacagtcccactggtcgtagatgcggagaagctgcctatcaaccggctcgcagctggcagcaaggccccggcctctgcccagagccgtggagagaagcgcacagcccacaacgccattgagaagcgctaccgctcctccatcaatgacaaaatcattgagctcaaggatctggtggtgggcactgaggcaaagctgaataaatctgctgtcttgcgcaaggccatcgactacattcgctttctgcaacacagcaaccagaaactcaagcaggagaacctaagtctgcgcactgctgtccacaaaagcaaatctctgaaggatctggtgtcggcctgtggcagtggagggaacacagacgtgctcatggagggcgtgaagactgaggtggaggacacactgaccccacccccctcggatgctggctcacctttccagagcagccccttgtcccttggcagcaggggcagtggcagcggtggcagtggcagtgactcggagcctgacagcccagtctttgaggacagcaaggcaaagccagagcagcggccgtctctgcacagccggggcatgctggaccgctcccgcctggccctgtgcacgctcgtcttcctctgcctgtcctgcaaccccttggcctccttgctgggggcccgggggcttcccagcccctcagataccaccagcgtctaccatagccctgggcgcaacgtgctgggcaccgagagcagagatggccctggctgggcccagtggctgctgcccccagtggtctggctgctcaatgggctgttggtgctcgtctccttggtgcttctctttgtctacggtgagccagtcacacggccccactcaggccccgccgtgtacttctggaggcatcgcaagcaggctgacctggacctggcccggggagactttgcccaggctgcccagcagctgtggctggccctgcgggcactgggccggcccctgcccacctcccacctggacctggcttgtagcctcctctggaacctcatccgtcacctgctgcagcgtctctgggtgggccgctggctggcaggccgggcagggggcctgcagcaggactgtgctctgcgagtggatgctagcgccagcgcccgagacgcagccctggtctaccataagctgcaccagctgcacaccatggggaagcacacaggcgggcacctcactgccaccaacctggcgctgagtgccctgaacctggcagagtgtgcaggggatgccgtgtctgtggcgacgctggccgagatctatgtggcggctgcattgagagtgaagaccagtctcccacgggccttgcattttctgacacgcttcttcctgagcagtgcccgccaggcctgcctggcacagagtggctcagtgcctcctgccatgcagtggctctgccaccccgtgggccaccgtttcttcgtggatggggactggtccgtgctcagtaccccatgggagagcctgtacagcttggccgggaacccagtggaccccctggcccaggtgactcagctattccgggaacatctcttagagcgagcactgaactgtgtgacccagcccaaccccagccctgggtcagctgatggggacaaggaattctcggatgccctcgggtacctgcagctgctgaacagctgttctgatgctgcgggggctcctgcctacagcttctccatcagttccagcatggccaccaccaccggcgtagacccggtggccaagtggtgggcctctctgacagctgtggtgatccactggctgcggcgggatgaggaggcggctgagcggctgtgcccgctggtggagcacctgccccgggtgctgcaggagtctgagagacccctgcccagggcagctctgcactccttcaaggctgcccgggccctgctgggctgtgccaaggcagagtctggtccagccagcctgaccatctgtgagaaggccagtgggtacctgcaggacagcctggctaccacaccagccagcagctccattgacaaggccgtgcagctgttcctgtgtgacctgcttcttgtggtgcgcaccagcctgtggcggcagcagcagcccccggccccggccccagcagcccagggcaccagcagcaggccccaggcttccgcccttgagctgcgtggcttccaacgggacctgagcagcctgaggcggctggcacagagcttccggcccgccatgcggagggtgttcctacatgaggccacggcccggctgatggcgggggccagccccacacggacacaccagctcctcgaccgcagtctgaggcggcgggcaggccccggtggcaaaggaggcgcggtggcggagctggagccgcggcccacgcggcgggagcacgcggaggccttgctgctggcctcctgctacctgccccccggcttcctgtcggcgcccgggcagcgcgtgggcatgctggctgaggcggcgcgcacactcgagaagcttggcgatcgccggctgctgcacgactgtcagcagatgctcatgcgcctgggcggtgggaccactgtcacttccagctagaccccgtgtccccggcctcagcacccctgtctctagccactttggtcccgtgcagcttctgtcctgcgtcgaagctttgaaggccgaaggcagtgcaagagactctggcctccacagttcgacctgcggctgctgtgtgccttcgcggtggaaggcccgaggggcgcgatcttgaccctaagaccggcggccatgatggtgctgacctctggtggccgatcggggcactgcaggggccgagccattttggggggcccccctccttgctctgcaggcaccttagtggcttttttcctcctgtgtacagggaagagaggggtacatttccctgtgctgacggaagccaacttggctttcccggactgcaagcagggctctgccccagaggcctctctctccgtcgtgggagagagacgtgtacatagtgtaggtcagcgtgcttagcctcctgacctgaggctcctgtgctactttgccttttgcaaactttattttcatagattgagaagttttgtacagagaattaaaaatgaaattatttataatctgggttttgtgtcttcagctgatggatgtgctgactagtgagagtgcttgggccctcccccagcacctagggaaaggcttcccctccccctccggccacaaggtacacaacttttaacttagctcttcccgatgtttgtttgttagtgggaggagtggggagggctggctgtatggcctccagcctacctgttccccctgctcccagggcacatggttgggctgtgtcaacccttagggcctccatggggtcagttgtcccttctcacctcccagctctgtccccatcaggtccctgggtggcacgggaggatggactgacttccaggacctgttgtgtgacaggagctacagcttgggtctccctgcaagaagtctggcacgtctcacctcccccatcccggcccctggtcatctcacagcaaagaagcctcctccctcccgacctgccgccacactggagagggggcacaggggcgggggaggtttcctgttctgtgaaaggccgactccctgactccattcatgcccccccccccagcccctcccttcattcccattccccaacctaaagcctggcccggctcccagctgaatctggtcggaatccacgggctgcagattttccaaaacaatcgttgtatctttattgacttttttttttttttttttctgaatgcaatgactgttttttactcttaaggaaaataaacatcttttagaaacaaaaaaaaaaaa

SEQ ID NO: 963 - DNA, 4325 bp, Homo sapiens
gccctttctgtgcggcgcccgggcgcaacgcaaacatggcggcgggtggcacccgtcggtgaggcggtgccgggcgggggttgtcgggtgtcatgggcggtggcgacggcaccgcccccgcgtctccctgagcgggacggcagggggggcttctgcgctgagccgggcgatggacgacagcggcgagctgggtggtctggagaccatggagaccctcacggagctgggcgacgagctgaccctgggagacatcgacgagatgctgcaatttgtcagtaatcaagtgggagagttccctgacttgttttcagaacagctgtgtagctcctttcctggcagtggtggtagtggtagcagcagcggcagcagtggcagcagcagcagcagcagcaatggcaggggcagcagcagcggagctgtggacccttcagtgcaacggtcattcacccaggtcacattaccttccttctctccctcggcggcctccccacaggctccaactctgcaagtcaaggtttctcccacctcagttcccaccacacccagggcaactcctattcttcagccccgcccccagccccagcctcaacctcaaactcagctgcaacaacagacggtaatgatcacgccaacattcagcaccactccgcagacgaggatcatccagcagcctttgatataccagaatgcagctactagctttcaagtccttcagcctcaagtccaaagcctggtgacatcctcccaggtacagccggtcaccattcagcagcaggtgcagacagtacaggcccagcgggtgctgacacaaacggccaatggcacgctgcagacccttgccccggctacggtgcagacagttgctgcgccacaggtgcagcaggtcccggtcctggtccagcctcagatcatcaagacagattcccttgttttgaccacactgaagacagatggcagccctgttatggctgcggtccagaacccggccctcaccgccctcaccacccctatccagacggctgcccttcaagtaccaaccctggtgggcagcagtgggaccattctgaccacaatgcctgtaatgatggggcaagagaaagtgcccattaagcaggtacctgggggagtcaagcagcttgagccccccaaagaaggagaaaggcggacaacccataatatcattgagaaacgatatcgctcctccatcaatgacaaaatcatcgaattgaaagacctggtcatggggacagacgccaagatgcacaagtctggcgttctgaggaaggccattgattacatcaaatacttgcagcaggtcaatcataaactgcgccaggagaacatggtgctgaagctggcaaatcaaaagaacaagcttctaaagggcatcgacctaggcagtctggtggacaatgaggtggacctgaagatcgaggactttaatcagaatgtccttctgatgtcccccccagcctctgactcagggtcccaggctggcttctctccctactccattgactctgagccaggaagccctctattggatgatgcaaaggtcaaagatgagccagactctcctcctgtggcgctgggcatggtagaccgctcacggattcttctgtgtgtcctcaccttcctgtgcctctcctttaaccccctgacttccctgctgcagtggggaggggcccacgactctgaccagcacccacactcaggctctggccgcagtgtcctgtcattcgagtcaggttctgggggctggtttgactggatgatgcctactcttctcttatggctggtaaatggtgtgattgtcctgagcgtctttgtgaagctgctggttcatggggagccagtgatccggccacactcgcgctcctcggtcaccttctggaggcaccggaaacaggcagatctggatctcgccagaggagattttgcagctgctgccggcaacctacaaacctgcctggcagttttgggccgggcactgcccacctcccgcctggacctggcctgcagcctctcctggaacgtgatccgctacagcctgcagaagctacgcctggtgcgctggctgctcaagaaagtcttccagtgccggcgggccacgccagccactgaggcaggctttgaagacgaagctaagaccagcgcccgggatgcggctctggcctatcaccggctgcaccagctgcacatcacagggaagcttcctgcaggatccgcctgttccgatgtacacatggcgttgtgtgccgtgaacctggctgaatgtgcagaggagaagatcccaccgagcacactggttgagatccatctgactgctgccatggggctcaagacccggtgtggaggcaagctgggcttcctggccagctacttcctcagccgagcccagagcctgtgtggccccgagcacagtgctgttcctgactccctgcgctggctctgccaccccctgggccagaagtttttcatggagcggagctggtctgtgaagtcagctgccaaggagagtctatactgtgcccagaggaacccagctgaccccattgcgcaggtccaccaggccttctgcaagaacctgctggagcgagctatagagtccttggtgaaacctcaggccaagaagaaggctggagaccaggaagaagagagctgtgaattctccagtgctctggagtacttgaaattacttcattcttttgtggactctgtgggggttatgagccccccactctccaggagctccgtgctcaagtccgccctgggtccagacatcatctgtcggtggtggacgtctgcaatcactgtggccatcagctggctccagggagacgatgcagctgtgcgctctcattttaccaaagtggaacgcatccccaaggccctggaagtgacagagagccccctggtgaaggccatcttccatgcctgcagagccatgcatgcctcactccctgggaaagcagatgggcagcagagttccttctgccattgcgagagggccagtggccacctatggagcagcctcaacgtcagtggggccacctctgaccctgccctcaaccacgtggtccagctgctcacctgtgacctgctactgtcgctacggacagcgctctggcaaaaacaggccagtgccagccaggctgtgggggagacctaccacgcgtcaggcgctgaactggcgggcttccaacgggacctgggcagcctgcgcaggctggcacacagcttccgcccagcataccgcaaggtgttcctgcatgaagccaccgtgcgcctgatggcaggagccagccccacccgcacccaccagctgctggaacacagcctgcggcggcgcaccacgcagagcaccaagcacggagaggtggatgcctggcccggccagcgagagcgggccaccgccatcctgctggcctgccgccacctgcccctctccttcctctcctccccgggccagcgggcagtgctgctggccgaagctgcccgcaccctggagaaggtgggcgaccggcgctcctgcaacgactgccagcagatgattgttaagctgggtggtggcactgccattgccgcctcctgaccaccaggctcagcccacccctccacctctctctcgatttctctctctccccctcagcatcttcccgctgagagtggtggggaagagccttgtcttcttagctgtcacctgccgaggcttctgggccactcaggccagtgcacccctgggcagagccccttaaagctgctgtcactagatgcccatggtccagggcctggtgggcgtgagaggataggtggcagggcagaaactgggcagccctgacttgatagcagcagggggagctcccaagctgccaagcccctgcctccagccttcctgagtttctctctcctgaaccctactctctcctttttgcttcctcagtttttatcaggctttctctgggggacagcagtctctgagcaccagggagcagttgccctcaggcctgtgcccagcatgccctcccctttttatacgaatgttttctaccagtgtgcttgggtttgccatgatgcgaggctgagttgctgtagcgtcttgattctctccctgggtctgcgttccctcccctgggcctgactgagcctgctcattgtttttccctttattacacaggacagccaggggaggaggggggcccagccctgggaggctggtgggaggcagggggcaggcctgcggatgcatgaaataatgttggcattattttttaattttttaaaaaataaatggtatcttatttaaaaaaaaaaaaaaaaaaaaa

SEQ ID NO: 964 - DNA, 4343 bp, Homo sapiens
aatggggagcggaggtgccggaaccacggaccaatggggcgggggcgctggggctcaccatataaggagcggcctcgccataaaaggaaacattgtatctctttatatggggggaagggtcgggggatccctccgccgccagcgcgtggtcccggccccctccacccgccgtctcggccgcggccagcagcccctgccccccgggggacgctgacggccgcccggcgcgccgccctagcagacggacagggggcgctgcgcgcggcctggggcaacccgggccacaggggcaggaaagtgagggcccaggtcggcccgggcgtgcaggggccccgggttcgcagcggcggccgcggcagcgatagcggcactagcagcagcgggagtgccgggttgagccgggaagccgatggcggcggctgcggcggctccgattcctcgctgactgcccgtccgccctcctgcatcgagcgccatgttaccgacccaagctggggccgcggcggctctgggccggggctcggccctggggggcagcctgaaccggaccccgacggggcggccgggcggcggcggcgggacacgcggggctaacgggggccgggtccccgggaatggcgcggggctcgggcccggccgcctggagcgggaggctgcggcagcggcggcaaccaccccggcgcccaccgcgggggccctctacagcggcagcgagggcgactcggagtcgggcgaggaggaggagctgggcgccgagcggcgcggcctgaagcggagcctgagcgagatggagatcggtatggtggtcggtgggcccgaggcgtcggcagcggccaccgggggctacgggccggtgagcggcgcggtgagcggggccaagccgggtaagaagacccggggccgcgtgaagatcaagatggagttcatcgacaacaagctgcggcgctacacgaccttcagcaagaggaagacgggcatcatgaagaaggcctatgagctgtccacgctgacagggacacaggtgctgttgctggtggccagtgagacaggccatgtgtatacctttgccacccgaaaactgcagcccatgatcaccagtgagaccggcaaggcactgattcagacctgcctcaactcgccagactctccaccccgttcagaccccacaacagaccagagaatgagtgccactggctttgaagagacagatctcacctaccaggtgtcggagtctgacagcagtggggagaccaaggacacactgaagccggcgttcacagtcaccaacctgccgggtacaacctccaccatccaaacagcacctagcacctctaccaccatgcaagtcagcagcggcccctcctttcccatcaccaactacctggcaccagtgtctgctagtgtcagccccagtgctgtcagcagtgccaatgggactgtgctgaagagtacaggcagcggccctgtctcctctgggggccttatgcagctgcctaccagcttcaccctcatgcctggtggggcagtggcccagcaggtcccagtgcaggccattcaagtgcaccaggccccacagcaagcgtctccctcccgtgacagcagcacagacctcacgcagacctcctccagcgggacagtgacgctgcccgccaccatcatgacgtcatccgtgcccacaactgtgggtggccacatgatgtaccctagcccgcatgcggtgatgtatgcccccacctcgggcctgggtgatggcagcctcaccgtgctgaatgccttctcccaggcaccatccaccatgcaggtgtcacacagccaggtccaggagccaggtggcgtcccccaggtgttcctgacagcatcatctgggacagtgcagatccctgtttcagcagttcagctccaccagatggctgtgatagggcagcaggccgggagcagcagcaacctcaccgagctacaggtggtgaacctggacaccgcccacagcaccaagagtgaatgatccgcccgccgccctggacagatggcccaagggatggcaccacttatttattgttgccttttcacgttttctttacacacacgttgacgggccgcaggagggaggcggggaggaggaacgggcagccacaggactgagccctctcactccagccaaagaaatgggcctgcctgcctccacccgtcctccctcagcctccccttcttcccgccccacctcccatttctgttgctggaggggctgtcctccttcctgggaccccctcgccagcttggctcgatgtttgccatgagtattagcttacccaatgggaccgtgccccacctccccacacacaggccttctgtggggctgggcaccgtgtcctcctctgaggaagcagttggggccctcttgccagcctccttgctgaccccaggtcagccctgtgtctgtcacaggctgggtcaaaagagccctggctctgcccctcagggggccagctggggagatgggggcttcttcctcacactgctgtcctctcccccttcagctcctgagtagctgggcctgtgcactgggcaggttcctggggccgcctgccctgccttgccgctccccttggacctccaggggctcctgggttggagggaaccaccagcgttcccttctcccccttgtcttcccccctctcctcccagctgctttacttaaagttgattttgaactttttatttgaggagacgaagtgaaaacaaatctataaatatatatttttaaaatatttaacttttttttatggcgtttttctcgtccccctccctgcccaaactccccttccctggggagccctcaggctccccagaactggctgggcccctggggacagagccaccccatgagctcggggtccaccagtgtgtgggggagattctgggtttgcccagtcctgggttgtttccaggagaaagccgggggaggggccctcaggccattccccaacggggtggggagggtgacccacagctctgggcctctttttgccctttagggctgttgctagggagagggaagagggagaccaaatgtcggggttggggtgggagggcgtcaggcagaggcaactgacttcatttgtgccacacgcatgggcattgcagccttgcgctgtcccaggcatgcagctgcctggggcccaagttgcagtgagcagggtggggtctgggagggggtgagaggcaggaatgggggtcagaagaagtgggagcagcttcttgggctgagtgcagccaaaggggagccagaaatgggcagttctcccagggagtgagcagctactgtaacttttttaaattaagacaaaaagccttgaagaaaatgactttatttttctaagtgtaacctcagtatttatgtaatttgtacaggggccatgccccacccccctcctccccctttggggtagaccttgagggtgggccagcataggggggagggtcttttaccctgtgtcagagcctaccttcaccacctatatccagaaggggagctttttcagaaacagggcagcagtggggtgaaattttcttaacccctaagactgccttcagtaggaacaagctggcttctgtgattaggtgaagggatgggggaagattttatgcacagcctagttatcaaggggatgatttgccgacatgtttgagaaccccctaacctctaaccctcattgctgtcttgccccagtttggggtgccaagatggaagtcacctttctgggctttctcctggagatagctggggcttatgggtggctttcaaggctggggcatggcaaatcaggggccagagagcaggggagcttgggactcaggtctgtaactgcccagccccttttctctgctcttgtttcactccaccatcactcactcactccccactcccccacccatggggaggagacctttgatgaattcttcctctccttcccacaaaagacagacccagtgagtgaatcaggcaaagtgcttataatgtgtgttgtgtgagcgtggccttgggaggacatgcgtgtgtcagggatgagttgaggtgatatttttatgtgcagcgacccttggtgtttcccttcctcggtggctctggggtatgtgtgtgtgggtgtgtgcgcctgagtgagtgtgtgtgcttgaatgtgagtgtgtatgtcagtggtttctacttcccctgggatgctgacccaggaatagtggacatggtcacagtcctatgtacagagctttcttttgtattaaaaaaaaatactctttcaataaatgtatcatttttgtgcacagaaaaaaaaaaaaaaaaaaaaaaaaaa

SEQ ID NO: 965 - DNA, 897 bp, Homo sapiens
gttgagggggtgttgagggcggagaaatgcaagtttcattacaaaagttaacgtaacaaagaatctggtagaagtgagttttggatagtaaaataagtttcgaactctggcacctttcaattttgtcgcactctccttgtttttgacaatgcaatcatatgcttctgctatgttaagcgtattcaacagcgatgattacagtccagctgtgcaagagaatattcccgctctccggagaagctcttccttcctttgcactgaaagctgtaactctaagtatcagtgtgaaacgggagaaaacagtaaaggcaacgtccaggatagagtgaagcgacccatgaacgcattcatcgtgtggtctcgcgatcagaggcgcaagatggctctagagaatcccagaatgcgaaactcagagatcagcaagcagctgggataccagtggaaaatgcttactgaagccgaaaaatggccattcttccaggaggcacagaaattacaggccatgcacagagagaaatacccgaattataagtatcgacctcgtcggaaggcgaagatgctgccgaagaattgcagtttgcttcccgcagatcccgcttcggtactctgcagcgaagtgcaactggacaacaggttgtacagggatgactgtacgaaagccacacactcaagaatggagcaccagctaggccacttaccgcccatcaacgcagccagctcaccgcagcaacgggaccgctacagccactggacaaagctgtaggacaatcgggtaacattggctacaaagacctacctagatgctcctttttacgataacttacagccctcactttcttatgtttagtttcaatattgttttcttttctctggctaataaaggccttattcatttca

SEQ ID NO: 966 - DNA, 1946 bp, Homo sapiens
gcttctgagcggaaactgaaagtgaaatagggagctggctaccagcgttgagtcccctgtaaagccaaaccccctaaaggtctccacactgctgtttaacggcacacttgacaatggcttcagcagcacgcttgacaatgatgtgggaggaggtcacatgccctatctgcctggaccccttcgtggagcctgtgagcatcgagtgtggccacagcttctgccaggaatgcatctctcaggttgggaaaggtgggggcagcgtctgtcctgtgtgccggcagcgctttctgctcaagaatctccggcccaatcgacagctagccaacatggtgaacaaccttaaagaaatcagccaggaggccagagagggcacacagggggaacggtgtgcagtgcatggagagagacttcacctgttctgtgagaaagatgggaaggccctttgctgggtatgtgcccagtctcggaaacaccgtgaccacgccatggtccctcttgaggaggctgcacaggagtaccaggagaagctccaggtggcattaggggaactgagaagaaagcaggagttggctgagaagttggaagtggaaattgcaataaagagagcagactggaagaaaacagtggaaacacagaaatctaggattcacgcagagtttgtgcagcaaaaaaacttcctggttgaagaagaacagaggcagctgcaggagctggagaaggatgagagggagcagctgagaatcctgggggagaaagaggccaagctggcccagcagagccaggccctacaggagctcatctcagagctagatcgaaggtgccacagctcagcactggaactgctgcaggaggtgataattgtcctggaaaggagtgagtcctggaacctgaaggacctggatattacctctccagaactcaggagtgtgtgccatgtgccagggctgaagaagatgctgaggacatgtgcagtccacatcactctggatccagacacagccaatccgtggctgatactttcagaagatcggagacaagtgaggcttggagacacccagcagagcatacctggaaatgaagagagatttgatagttatcctatggtcctgggtgcccagcactttcactctggaaaacattactgggaggtagatgtgacaggaaaggaggcctgggacctgggtgtctgcagagactctgtgcgcaggaaggggcactttttgcttagttccaagagtggcttctggacaatttggttgtggaacaaacaaaaatatgaggctggcacctacccccagactcccctccaccttcaggtgcctccatgccaagttgggattttcctggactatgaggctggcatggtctccttctacaacatcactgaccatggctccctcatctactccttctctgaatgtgcctttacaggacctctgcggcccttcttcagtcctggtttcaatgatggaggaaaaaacacagcccctctaaccctctgtccactgaatattggatcacaaggatccactgactattgatggctttctctggacactgccactctccccattggcaccgcttctcagccacaaaccctgcctcttttccccatgaactctgaaccacctttgtctctgcagaggcatccggatcccagcaagcgagctttagcagggaagtcacttcaccatcaacattcctgccccagatggctttgtgattccctccagtgaagcagcctccttatatttggcccaaactcatcttgatcaaccaaaaacatgtttctgccttctttatgggacttaagttttttttttctcctctccatctctaggatgtcgtctttggtgagatctctattatatcttgtatggtttgcaaaagggcttcctaaaaataaaaaataaaatttaaaaaactgtgaaaaaaaaaaaaaaaaa

SEQ ID NO: 967 - DNA, 2825 bp, Homo sapiens
gtacggcttccggtggcgggacgcggggccgcgcacgcgggaaaagcttccccggtgtccccccatccccctccccgcgccccccccgcgtccccccagcgcgcccacctctcgcgccggggccctcgcgaggccgcagcctgaggagattcccaacctgctgagcatccgcacacccactcaggagttggggcccagctcccagtttacttggtttcccttgtgcagcctggggctctgcccaggccaccacaggcaggggtcgacatggcagagacactggagttcaacgacgtctatcaggaggtgaaaggttccatgaatgatggtcgactgaggttgagccgtcagggcatcatcttcaagaatagcaagacaggcaaagtggacaacatccaggctggggagttaacagaaggtatctggcgccgtgttgctctgggccatggacttaaactgcttacaaagaatggccatgtctacaagtatgatggcttccgagaatcggagtttgagaaactctctgatttcttcaaaactcactatcgccttgagctaatggagaaggacctttgtgtgaagggctggaactgggggacagtgaaatttggtgggcagctgctttcctttgacattggtgaccagccagtctttgagatacccctcagcaatgtgtcccagtgcaccacaggcaagaatgaggtgacactggaattccaccaaaacgatgacgcagaggtgtctctcatggaggtgcgcttctacgtcccacccacccaggaggatggtgtggaccctgttgaggcctttgcccagaatgtgttgtcaaaggcggatgtaatccaggccacgggagatgccatctgcatcttccgggagctgcagtgtctgactcctcgtggtcgttatgacattcggatctaccccacctttctgcacctgcatggcaagacctttgactacaagatcccctacaccacagtactgcgtctgtttttgttaccccacaaggaccagcgccagatgttctttgtgatcagcctggatcccccaatcaagcaaggccaaactcgctaccacttcctgatcctcctcttctccaaggacgaggacatttcgttgactctgaacatgaacgaggaagaagtggagaagcgctttgagggtcggctcaccaagaacatgtcaggatccctctatgagatggtcagccgggtcatgaaagcactggtaaaccgcaagatcacagtgccaggcaacttccaagggcactcaggggcccagtgcattacctgttcctacaaggcaagctcaggactgctctacccgctggagcggggcttcatctacgtccacaagccacctgtgcacatccgcttcgatgagatctcctttgtcaactttgctcgtggtaccactactactcgttcctttgactttgaaattgagaccaagcagggcactcagtataccttcagcagcattgagagggaggagtacgggaaactgtttgattttgtcaacgcgaaaaagctcaacatcaaaaaccgaggattgaaagagggcatgaacccaagctacgatgaatatgctgactctgatgaggaccagcatgatgcctacttggagaggatgaaggaggaaggcaagatccgggaggagaatgccaatgacagcagcgatgactcaggagaagaaaccgatgagtcattcaacccaggtgaagaggaggaagatgtggcagaggagtttgacagcaacgcctctgccagctcctccagtaatgagggtgacagtgaccgggatgagaagaagcggaaacagctcaaaaaggccaagatggccaaggaccgcaagagccgcaagaagcctgtggaggtgaagaagggcaaagaccccaatgcccccaagaggcccatgtctgcatacatgctgtggctcaatgccagccgagagaagatcaagtcagaccatcctggcatcagcatcacggatctttccaagaaggcaggcgagatctggaagggaatgtccaaagagaagaaagaggagtgggatcgcaaggctgaggatgccaggagggactatgaaaaagccatgaaagaatatgaagggggccgaggcgagtcttctaagagggacaagtcaaagaagaagaagaaagtaaaggtaaagatggaaaagaaatccacgccctctaggggctcatcatccaagtcgtcctcaaggcagctaagcgagagcttcaagagcaaagagtttgtgtctagtgatgagagctcttcgggagagaacaagagcaaaaagaagaggaggaggagcgaggactctgaagaagaagaactagccagtactccccccagctcagaggactcagcgtcaggatccgatgagtagaaacggaggaaggttctctttgcgcttgccttctcacaccccccgactccccacccatattttggtaccagtttctcctcatgaaatgcagtccctggattctgtgccatctgaacatgctctcctgttggtgtgtatgtcactagggcagtggggagacgtcttaactctgctgcttcccaaggatggctgtttataatttggggagagatagggtgggaggcagggcaatgcaggatccaaatcctcatcttactttcccgaccttaaggatgtagctgctgcttgtcctgttcaagttgctggagcaggggtcatgtgaggccaggcctgtagctcctacctggggcctatttctactttcattttgtatttctggtctgtgaaaatgatttaataaagggaactgactttggaaaccaaaaaaa

SEQ ID NO: 968 - DNA, 1271 bp, Homo sapiens
cactttgtcaccaactgctgccaactcgccaccactgctgccgacctcgcaaccactgctttgtctctgaagtgagactgctcctggtgccatgaacggagacgacacctttgcaaagagacccagggatgatgctaaagcatcagagaagagaagcaaggcctttgatgatattgccacatacttctctaagaaagagtggaaaaagatgaaatactcggagaaaatcagctatgtgtatatgaagagaaactataaggccatgactaaactaggtttcaaagtcaccctcccacctttcatgtgtaataaacaggccacagacttccaggggaatgattttgataatgaccataaccgcaggattcaggttgaacatcctcagatgactttcggcaggctccacagaatcatcccgaagatcatgcccaagaagccagcagaggacgaaaatgattcgaagggagtgtcagaagcatctggcccacaaaacgatgggaaacaactgcaccccccaggaaaagcaaatatttctgagaagattaataagagatctggacccaaaagggggaaacatgcctggacccacagactgcgtgagagaaagcagctggtgatttatgaagagatcagtgaccctgaggaagatgacgagtaactcccctgggggatacgacacatgcccttgatgagaagcagaacgtggtgacctttcacgaacatgggcatggctgcggctccctcgtcatcaggtgcatagcaagtgaaagcaagtgttcacaacggtgaaacttgagcgtcatttttcttagtgtgccaagagttcgatgttagtgtttccattgtattttcttacagtgtgccattctgttagatactatccttataattgatgagcaagacatactgaatgcatatttcggtttgtgtatccatgcacctacgtcagaaaacaagtattgtcaggtattctctccatagaacagcactatcctcatctctccccagatgtgactactgagggcagttctgagtgtttaatttcagactttttcctctgcatttacacacacacacacacacacacgcacacacacacaccaagtaccagtataagcatctcccatctgcttttcccattgccatgcgtcctggtcaagcccccctcactctgtttcctgttcagcatgtactcccctcatccgattcccctgtatcagtcactgacagttaataaacctttgcaaacgttcaaaaaaaaaaaaaaaaaa

SEQ ID NO: 969 - DNA, 1466 bp, Homo sapiens
gcatgctctgactttctctctctttcgattcttccatactcagagtacgcacggtctgattttctctttggattcttccaaaatcagagtcagactgctcccggtgccatgaacggagacgacgcctttgcaaggagacccacggttggtgctcaaataccagagaagatccaaaaggccttcgatgatattgccaaatacttctctaaggaagagtgggaaaagatgaaagcctcggagaaaatcttctatgtgtatatgaagagaaagtatgaggctatgactaaactaggtttcaaggccaccctcccacctttcatgtgtaataaacgggccgaagacttccaggggaatgatttggataatgaccctaaccgtgggaatcaggttgaacgtcctcagatgactttcggcaggctccagggaatctccccgaagatcatgcccaagaagccagcagaggaaggaaatgattcggaggaagtgccagaagcatctggcccacaaaatgatgggaaagagctgtgccccccgggaaaaccaactacctctgagaagattcacgagagatctggaaatagggaggcccaagaaaaggaagagagacgcggaacagctcatcggtggagcagtcagaacacacacaacattggtcgattcagtttgtcaacttctatgggtgcagttcatggtacccccaaaacaattacacacaacagggacccaaaaggggggaacatgcctggacccacagactgcgtgagagaaaacagctggtgatttatgaagagatcagcgaccctgaggaagatgacgagtaactcccctcagggatacgacacatgcccatgatgagaagcagaacgtggtgacctttcacgaacatgggcatggctgcggacccctcgtcatcaggtgcatagcaagtgaaagcaagtgttcacaacagtgaaaagttgagcgtcatttttcttagtgtgccaagagttcgatgttagcgtttacgttgtattttcttacactgtgtcattctgttagatactaacattttcattgatgagcaagacatacttaatgcatattttggtttgtgtatccatgcacctaccttagaaaacaagtattgtcggttacctctgcatggaacagcattaccctcctctctccccagatgtgactactgagggcagttctgagtgtttaatttcagattttttcctctgcatttacacacacacgcacacaaaccacaccacacacacacacacacacacacacacacacacacacacacaccaagtaccagtataagcatctgccatctgcttttcccattgccatgcgtcctggtcaagctcccctcactctgtttcctggtcagcatgtactcccctcatccgattcccctgtagcagtcactgacagttaataaacctttgcaaacgttcaaaaaaaaaaaaaaaaaa

SEQ ID NO: 970 - DNA, 1290 bp, Homo sapiens
ctctctctttcgattcttccatactcaagagtacgcacggtctgattttctctttggattcttccaaaatcagagtcagactactccctgtgccatgaacggagatgacacctttgcaaggagacccacggttggtgctcaaataccagagaagatacaaaaggccttcgatgatattgccaaatacttctctaaggaagagtgggaaaagatgaaagtctcggagaaaatcgtctatgtgtatatgaagagaaagtatgaggccatgactaaactaggtttcaaggccatcctcccatctttcatgcgtaataaacgggtcacagacttccaggggaatgattttgataatgaccctaaccgtgggaatcaggttcaacgtcctcagatgactttcggcaggctccagggaatcttcccgaagatcatgcccaagaagccagcagaggaaggaaatgtttcgaaggaagtgccagaagcatctggcccacaaaacgatgggaaacagctgtgccccccgggaaaaccaactacctctgagaagattaacatgatatctggacccaaaaggggggaacatgcctggacccacagactgcgtgagagaaagcagctggtgatttatgaagagatcagcgatcctgaggaagatgatgagtaactccccttggggatatgacacatgcccatgatgagaagcagaacgtggtgacctttcacgaacatgggcatggctgtggacccctcgtcatcaggtgcatagcaagtgaaagcaagtgttcacaacagtgaaaagttgagcgtcatttttcttagtgtgccaagagtacgatattagcgtttccattgtattttcttgaagtgtgtcattctgttagatattaacattttcactgatgagcaagacatacttaatgcatattttggtttgtgtatccatgcacctaccttagaaaacaagtattgtcagttacctctgcatggaacagcattaccctcctctctccctagatgtgactactgagggcagttctgagtgtttaatttcagattttttcctctgcatttacacacacacacaaaccacaccacacacacacacacacacacacagacacacaccaagtaccagtataagcatctcccatctgcttttcccattgccatgcgtcctggtcaggcttccctcactctgtttcctggtcagcatgtactcccctcatccgattcccctgtagcagtcactgacagtaaataaacctttgcaaacgttaaaaaaaaaaaaaaaaa

SEQ ID NO: 971 - DNA, 1250 bp, Homo sapiens
acacgccgatttgcccttttgattcttccacaatcagggtgagactgctcccagtgccatgaacggagacgacgcctttgcaaggagacccagggatgatgctcaaatatcagagaagttacgaaaggccttcgatgatattgccaaatacttctctaagaaagagtgggaaaagatgaaatcctcggagaaaatcgtctatgtgtatatgaagctaaactatgaggtcatgactaaactaggtttcaaggtcaccctcccacctttcatgcgtagtaaacgggctgcagacttccacgggaatgattttggtaacgatcgaaaccacaggaatcaggttgaacgtcctcagatgactttcggcagcctccagagaatcttcccgaagatcatgcccaagaagccagcagaggaagaaaatggtttgaaggaagtgccagaggcatctggcccacaaaatgatgggaaacagctgtgccccccgggaaatccaagtaccttggagaagattaacaagacatctggacccaaaagggggaaacatgcctggacccacagactgcgtgagagaaagcagctggtggtttatgaagagatcagcgaccctgaggaagatgacgagtaactcccctcggggatatgacacatgcccatgatgagaagcagaacgtggtgacctttcacgaacatgggcatggctgcggacccctcgtcatcaggtgcatagcaagtgaaagcaagtgttcacaacagtgaaaagttgagcgtcatttttcttagtgtgccaagagttcgatgttggcgtttccgctgtattttcttgcagtgtgccattctgttagacattagcgttttcgttgatgagcaagacatgcttaatgcatatttcggcttgtgtatccatgcacctacctcagaaaacaagtattgtcaggtattctctccatagaacagcactaccctcctctctccccagatgtgactactgaggggaggtctgagtgtttaatttccgattttttcctctgcatttacacacacaccacacacgcacacacacacaccaagtaccagtataagcatctcccatctgcttttctccattgccatgcgacctggtcaagcccccctcactctgtttcctgttcagcatgtactcccctcatccgattccgttgtatcagtcactgacagttaataaacctttgcaaacgttcaaaaaaaaaaaaaaaaaaaaaaaaaaaaaaaaa

SEQ ID NO: 972 - DNA, 1399 bp, Homo sapiens
cgctctgattgtttcgattcttccaaaatcagagacagagtgctcccggtgccatgaacggagacgatgcctttgtacggagacctagggttggttctcaaataccagagaagatgcaaaagcatccctggagacaagtctgtgaccgtggaatacatttggtgaatctcagtccgttctggaaggtgggaagagagccagccagcagcattaaagctctactgtgtggcaggggagaagctagggccttcgatgatattgccaaatacttctctgagaaagagtgggaaaagatgaaagcctcggagaaaatcatctatgtgtatatgaagagaaagtatgaggccatgactaaactaggtttcaaggccaccctcccacctttcatgcgtaataaacgggtcgcagacttccaggggaatgattttgataatgaccctaaccgtgggaatcaggttgaacatcctcagatgactttcggcaggctccagggaatcttcccgaagatcacgcccgagaagccagcagaggaaggaaatgattcgaagggagtgccagaagcatctggcccacagaacaatgggaaacagctgcgcccctcaggaaaactaaatacctctgagaaggttaacaagacatctggacccaaaagggggaaacatgcctggacccacagagtgcgtgagagaaagcaactggtgatttatgaagagatcagcgaccctcaggaagatgacgagtaactcccctcggggatatgacacatgcccatgatgagaagcagaacgtggtgacctttcacgaacatgggcatggctgcggatccctcgtcatcaggtgtatagcaagtgaaagcaagtgttcacaacagtgaaaagttgagcgtcatttttcttagtgtgccaagagttcgatgttagtgtttctgttgtattttgttacagtgtgccattctgttagatattagcgttttcactgatgagcaagacatacttaatgcatatttcagtttgtgtatccatgcacctacctcagaaaacaagtatcgtcaggtattctctgcatagaacaacactaccctcctctcttcccagatgtgaccactgagggcagttctgagtgtttaatttcagattttttcctctgcatttacacaaacacacacacatgccacacagacacacatgcgcgcgcgcgcgcacacacacacacacacacacacacacacacacacacaccaagtaccagtataggcatctcccaactgcttttccccatgtgtcctggtcaagcccccctcactctgtttcctgttcagcatgtactcccctcatccgattcccctctatcagtcactgccagttaataaacctttgcaaacgttaaaaaaaaaaaaaaa

SEQ ID NO: 973 - DNA, 1281 bp, Homo sapiens
tctgattttggaagaatctaaagagaatatcagagcatgcatactctgaacttggagtagccaatcccaggggacgctttaggcgggaaaatcagagtctccgtcagagtgctcctggtgccatgaacggagacgacgcctttgcaaagagacccagggatgatgctaaagcatcagagaagagaagcaaggccttcgatgatattgccaaatacttctctaaggaagagtgggaaaagatgaaattctcggagaaaatcagctgtgtgcatatgaagagaaagtatgaggccatgactaaactaggtttcaacgtcaccctctcacttttcatgcgtaataaacgggccacagactctcagaggaatgattctgataatgaccgtaaccgtgggaatgaggttgaacgtcctcagatgacttttggcaggctccagagaatcatcccgaagatcatgcccgagaagccagcagaggaaggaagtgattcgaagggagtgccagaagcatctggcccacagaacgatgggaaaaagctgtgcccgccgggaaaagcaagtagctctgagaagattcacgagagatctggacccaaaagggggaaacatgcctggacccacagactgcgtgagagaaagcagctggtgatttatgaagagatcagcgaccctgaggaagatgacaagtaactcccctcagggatacgacacatgcccatgatgagaagcagaacgtggtgacctttcacgaacgtgggcatggctgcggacccctcgtcatcaggtgtatagcaagtgaaagcaagtgttcacaacagtgaaaagttgagcgtcatttttcttagtgtgccaagagttcgatgttggcgtttccgttgtattttcttgcagtgtgccattctgttagacattagcattttcgttgatgagcaagacatgcttaatgcatatttcggcttgtgtatccatgcacctacctcagaaaacaagtattgtcaggtattctctccatagaacagcactaccctcctctctccccagatgtgactactgaggggaggtctgagtgtttaatttccgattttttcctctgcatttacacacacaccacacacgcacacacacacaccaagtaccagtataagcatctcccatctgcttttctccactgccatgtgtcctggtcaagcccccctcactctgtttcctgttcagcatgtactcccctcatccgattcccctctatcagtcactgacagttaataaacctttgcaaacgttc

SEQ ID NO: 974 - DNA, 1340 bp, Homo sapiens
ccaggctccagggacagaaccttctcaaagtgggggtggagactctgattttcccgcctaaagcatcccctgggattggctactttaagttcagagtatgcatgctctgactttctctctcgattcttccatactcagagtcagactgctcctggtgccatgaacggagacgacgcctttgcaaggagacctagggctggtgctcaaataccagagaagatccaaaagtccttcgatgatattgccaaatacttctctaagaaagagtgggaaaagatgaaatccttggagaaaatcagctatgtgtatatgaagagaaagtatgaggccatgactaaactaggcttcaaggccaccctcccacctttcatgcataatacaggggccacagacctccaggggaatgattttgataatgaccgtaaccaagggaatcaggttgaacgtcctcagatgactttttgcaggctccagagaatcttcccgaagatcatgcccaagaagccagcagaggaaggaaatgattcgaagggagtgccagaagcatctggctcacagaacgatgggaaacacctgtgccctccaggaaaaccaagtacctctgagaagattaacaagacatccggacccaaaagggggaaacatgcctggacccacagactgcgtgagagaaagcagctggtgatttatgaagagatcagcgaccctgaagaagacgacgagtaactcccctcggggatacgacatatgcccatgatgagaagcagaacgtggtgacctttcacgaacatgggcatggctgcggacccctcgtcatcaggtgcatagcaagtgaaagcaagtgttcacaacagtgaaaagttgagcgtcgtttttcttagtgtgacaagagttcgatgttagtgtttccattgtattttcttacagtgtgccattctgttagatattagcgttttcattgatgagcaagacatgcttaatgtgtatttcggtttgtgtatccatgcacctacctcagaaagcaagtatagtcaggtattctctccatagaacagcactaccctcctctctccccagatgtgactactgagggcagatctgagtgtttaatttccgattttcccctctgcatttacacaccagacacacaaacacacacacacagacacacacacacacagacacaccaagtaccagtataagcatctcccatatgcttttccccattgccatgagtcctggtcaagccccccttcaatttgtttcctgttcagcatgtactcccctcctctgattccccgtatcagtcactgacagttaatacacctttgcaaacgttc

SEQ ID NO: 975 - DNA, 1253 bp, Homo sapiens
cactttgtcaccaactgctgccaactcgccaccactgctgccgacctcgccaccactgctttgtctctgagtgagagtgctcctggtgccatgaacggagacgacgcctttgcaaagagacccagggatgatgataaagcatcagagaagagaagcaaggccttcaatgatattgccacatacttctctaagaaagagtgggaaaagatgaaatactcggagaaaatcagctatgtgtatatgaagagaaactatgaggccatgactaaactaggtttcaatgtcaccctcccacctttcatgtgtaataaacaggccacagacttccaggggaattattttgataatgaccgtaaccgcaggattcaggttgaacgtcctcagatgacttttggcaggctccagagaatcatcccgaagatcatgcccaagaagccagcagaggaaggaaatgattcgaagggagtgtcagaagcatctggcccacagaacgatgggaaacagctgcgccgccccgggaaaagcaaatacttctgagaagattaataagagatctggacccaaaagggggagacatgcctggacccacagactgcgtgagagaaaccagctggtgatttatgaagagatcagagaccctgaggaagatgatgagtaactcccctgggggatatgacacatgcccatgatgagaagcagaacatggtgacctttcacgaacatgggcatggctgcggaccctcgtcatcaggtgcatagcaagtgaaagcaagtgttcacaacagtgaaaagttgagcgtcatttttcttagtgtgccaagagttcgatgttagtgtttccattgtattttcttacactgtgccattctgttagatactatccttttcaatgatgagcaagacatacttaatgcatatttcggtttgtgtatccatgcacctacgtcagaaaacaagtattgtcatgtattctctgcatagaacagcactatcctcatctctccccagatgtgactactgagggcagtcctgagtgtttaatttcagacttcttcctctgcatttacacaccacacaacacacacacacacacacacacaccaagtaccattataagcatctcccatctgcttttcccattgccgtgcatcctggtcaagcccccctcactctgtttcctgttcagcatgtactcccctcatccgattcccctctatcagtcactgacagttaacaaacctttgcaaacattc

SEQ ID NO: 976 - DNA, 1254 bp, Homo sapiens
ctttcgattcttccatactcagagtacgcacggtctgattttctctttcgattcttccaaaatcagagacagactgctcccggtgccatgaacggagacgatgcctttgcaaggagacctagggctggttctcaaataccagagaagatccaaaaggccttcgatgatattgccaaatacttctctaagaaagagtgggaaaagatgaaatcctcggagaaaatcatctatgtgtatatgaagagaaagtatgaggccatgactaaactaggtttcaaggctaccctcccacctttcatgtgtaatacaggggccacagacctccaggggaatgattttgataatgaccgtaaccacaggaatcaggttgaacgttctcagatgactttcggcaggctccagggaatcttcccgaagatcatgcccaagaagccagcagaggtaggaaatgattcgaaggaagtgccagaagcatctggcttacagaacgatgggaaacagctgtgccccccgggaaaaccaactacctctgagaagattaacaaggcatctggacccaaaagggggaaacatgcctggacccacagactgcgtgagagaaagcagctggtgatttatgaagagatcagcgaccctgaagaagacgacgagtaactcccctcggggatacgacacatgcccatgatgagaagcagaatgtggtgacctttcacgaacgtgggcatggctgcggacccctcgtcatcaggtgcatagcaagtgaaagcaagtgttcacaacagtgaaaagttgagcttcattttttagtgtgccaagagttcgatgttagtgtttccgttgtattttcttatagtgtgcaattctgttagatattaatgttttcattgatgagcaagacatgcttaatgtgtatttcggtttgtgtatccatgcacctacctcagaaaacaagtatagtcaggtattctctccatagaacagcactaccttcctctctccccacatgtgactactgagggcagttctgagtgtttaatttccgattttctcctctgcatttacacacacacacacacacacacacagagacacacacacacaccaagtaccagtataagcatctcccatctgcttttccccattgccatgcgtcctggtcaagcccccctcactctgtttcctgttcagcatgtactcccctcctctgattccccgtatcagtcactgacagttaatacacctttgcaaacgttc

SEQ ID NO: 977 - DNA, 6330 bp, Homo sapiens
cgcttgttcgctcactctcagtgaaaagagttttgaaatgagttctgaatagacagcattttctttgtgcggttggtaaataacacagagcaaagttagcaagttgcagcgcctctgcgttctgattctatggaacctttttgtagggagaagggcaggatgtttttaactgaatgtgacctcaggggaatactagagaaaataataaaatttctgaatggggcagcgtggagaaatcctaagagaaatagcataagagcattttggaacacatccaggaaaagataactttcgacacacctgtagacgttcgccaggtaaaggagtgatggaaactctccagttcagatccagtagcttttagggaaggaactacagttgctgacttaagttgaagaagcatctatttaatgtctggtcaaatcctacaagaaacacagaaatctatgattaaaaagctgagcactttgatatactgcaaagggtagagaaggcaggacggtagaaattttctgcaagaaagaatgaatttcaggatttatcactaaataagacaaagtcatttatttagtccccctgacacagcagggcaaactgagttgacatacaagttacctggagaaaaagagagcaattccaggacttcctcttcagcctaaaagaaggtaccagatctgtgcactggggcgatgtggaagagacctgcttattgcccctgatgtaagctccagtaagaaaagacgtcaagtacaagtactaggaaatcactttatacatctgtttataggaatgacctcaggactttgtgttcatgttatagatggatgcagaggctgaagataaaacgctgcgtactcgctctaaaggaaccgaggtgccaatggattcactaatccaggagctcagtgttgcctatgattgctccatggcaaagaagagaacagctgaagatcaggctttgggggttccagtcaacaaaaggaaatccctgctaatgaagccccgacactacagcccaaaagcagactgccaagaagaccgcagtgacaggacagaggacgatggccccttggaaacacatggtcactctaccgcagaggaaatcatgataaaacctatggatgaaagtcttctttcaactgcacaagaaaactccagtaggaaggaagacagatactcttgttatcaagagctcatggtcaagtctttaatgcacttggggaaatttgaaaaaaatgtatctgttcagactgtaagtgaaaatttaaatgacagtggcatccagtctttaaaagcagagagcgatgaagcagacgagtgctttctgattcattctgatgatggaagagacaagattgatgattctcagccacccttctgctcctctgatgacaatgaaagtaactctgaaagtgcagaaaatggctgggacagtggctccaacttctcagaagaaaccaaaccacctagagtcccaaagtatgttttaacagatcataaaaaagacctattggaagttcctgaaataaaaactgaaggtgacaaatttatcccttgtgagaacaggtgtgattctgaaacagaaaggaaagacccgcagaatgctctcgcagaacccctggatggcaatgcccagccctcattccctgacgttgaggaggaagatagcgagagcctggcagtaatgacggaagagggtagtgacctggaaaaggccaaggggaatttaagtttgctggagcaggcaattgctctgcaggctgagcgaggttgtgttttccataacacctacaaagagctggataggttcctgctggagcacctagcaggggaaaggaggcaaaccaaagttatcgacatgggtggaagacaaatctttaacaataaacattcaccaaggcctgaaaagagggagaccaagtgcccgatccctggatgtgatggcacgggacacgtgacagggctctacccgcaccaccgcagcctttcggggtgcccccacaaagtgcgggttcccctggaaattcttgccatgcatgaaaatgtgctcaagtgtcccacgccgggatgcacaggaaggggtcatgtgaacagcaaccgcaacacccacaggagtctttctggttgtccaattgctgcagctgaaaaattggcaatgtcccaggataaaaatcagcttgattctccccaaactgggcagtgtcctgaccaggcccacaggacaagtttggtgaagcaaattgaattcaatttcccgtcacaagccatcacctctcccagagccacagtgtcaaaagaacaagagaagtttggaaaagtaccatttgattatgccagttttgatgcccaagttttcggtaaacgccctctcatacaaacagtgcaaggacgaaaaacaccaccatttcctgaatcaaagcattttccaaatccagtgaaatttcctaatcgactgcctagtgcaggcgcccacacccagagccctggccgtgccagctcttatagctacggtcaatgtagtgaagacacccacatagcagcagctgctgccatcctgaacctttccacccgctgcagggaagccacagacatcctctccaacaagccacagagtctgcatgccaagggagccgaaatagaagtggatgaaaatggcacattggacttaagcatgaaaaaaaatcgaatcctggacaagtctgcacccctaacttcctctaacacttctattccaactccttcctcttccccattcaaaacaagcagcattctggtcaatgcagcattctatcaggctctttgtgaccaagagggctgggacactcctatcaactatagcaaaactcacgggaagacagaggaggagaaagagaaagacccagtgagctctctagaaaatttagaggaaaaaaagtttcctggagaggcctctataccaagccctaaacccaagcttcatgcaagagatctcaaaaaggaactaatcacctgtccaacaccaggatgtgatggaagtggccacgtgacaggaaactatgcatctcatcgcagtgtttctggatgtcctttagcagataagactctaaaatccctcatggctgccaactctcaggagcttaagtgtccaaccccaggctgcgatggctcggggcacgtgactggaaactatgcttcccacagaagcttgtccggatgccctcgtgcaaggaaaggtggtgtcaaaatgacccctaccaaggaagaaaaagaagaccctgaactgaaatgtcctgtgatagggtgtgatggccaaggtcacatatcaggtaaatacacatcacaccgcacagcttctggctgtcctctggctgccaagagacagaaggagaatcctctcaatggagcctccctctcctggaaactgaacaaacaagagctaccacattgtcccttgccaggctgcaatgggctgggccatgtaaataatgtttttgtcacccaccgaagcttatctggatgtcctctcaatgcacaagttatcaaaaagggcaaggtttctgaagaactcatgaccatcaagctcaaagcaactgggggaatagagagtgatgaagaaattaggcatttggatgaagaaataaaggaactgaatgaatccaaccttaaaattgaagcagatatgatgaaacttcagacccagatcacatctatggagagcaacttaaagacgatagaggaggagaacaaactcatagaacagaacaatgaaagtctgctgaaagagctggcaggtctaagccaagctctcatttcaagccttgctgacatccagcttccacagatgggacctatcagtgagcagaattttgaagcatatgtaaatacactcacagatatgtacagcaatctggaacgggactattccccggaatgcaaagctctactggaaagtatcaaacaggcagtgaagggtatccatgtgtaggatcacagcgctgccgggcaacagaagttaccaacagcagtaaactccagatggatctgttagaggttcatgtactgctaaggcgtggaggttgccgtactgcatttacaatttgcaacattgcactaattttattttccccagctgatataaaaaggaaagaaaaactatgatagacttcttggattaaaagcaatgcagtcaattattagatcttatttattttcatatgtttttcttttatttcttcattgtactctttttttttttgtaaagtatatgtaaaataaatgtgacatttttataatttatttattactaatcaaagagttttttatcttttaactgcattttgaagtctgccgtatttttacaagtgtgtttattaatttattttccaataggatttaaatagaaatgctattctcaagtcatctttcttgctgggttttaatgaggaaacaggaaagggtgaaggaaatccttgtctaaggactgcactatagttgagtttgatttttattgcacacttcttcccccacctttcactgatttttgtatttataaatgaatttgcggtaaggtgagctgcacggaaggaataagaagacaaatggcgcccactagtggggaatccgcactcacaaaagcacaggatgctggaaaacagcctgctcagaatttgttagcaataattaaatatagcaatcagcaaagtattcgacttggctggacggttttcgttaatatgaattatttatttgaaatgttttaaagaaacataagcctttttagtgatgcagatttgtctgtttgtttttcaagtcatatcagatcgttggcaactcgtatcccaagatgaaaaataagacttggtgtgaccagccaggctttcctgccatatgttggtacaatatacaagtgacaatattggtgtagatttgtacttagcaaatacaaacacatccaaatgaaaaattttgtagataccatatcccctgaaatagcatttatcttactgggttgactggaaaggaatggaaaatatagtaacacatgaaaaaatgctactccaatctgaatgattacttcaaacactggcaccttgggtctcacccaccataggaaacaagacaacattcaatttgatagaaatcttgccacaaaacttcaaatgctacaaaatatacacacacactcacacacacaggcatactcacacacagacacacacacacacacacacacagactcatccacacttcaaattgagcccacaatcttgaatttctgaacggatcagagtttcatagtttctatagtaaaggcaatgtctatttcagggattgtaaagtagttaagcattgtttcaaaagtttttttatatttattttttttaaggaaaaggtatagacaaccagctaaactgcctttttggtgtgcacacacatttcatgtgcagacgtgcctctgtgtaaatgtacacatgaacttcatgtgggcttaattttctgtgctataaacaaaagtgtttattttttattaacctcatggatatttagatggaaagtgatggcattcacaggcttgatgtattccactgttattactgttacctgcacaaatgaaaaacaatactcaacagtaattccactcccatgaaactttggtcattgttatgcattaagtggggcttatctttggtttggagttcatttgaactcttgaaccttagtttagtgaagatgaactgtctgttcttaggtagaaacggtgtttatttaaaaatcagttttaaaaaatgagctaccatatgtgctgtctattataaatgggacaccaaacaaaattttctattacagttgtgtacttgcaaacattttgctatacagtacttcatagatgcatacaaatgagctcacttattacaaagacaaacgtttaatttgctaaatattttaacaagtttgttatatattttatttaatttaaaagaaatctcttaccaacctacatatttattactataatttgctatgacttcaggttaatttatttgtgtttgcatagtttgagcaggatgttttgtgaagtatgtttgtatttatttgcctactttgtacttgatgtgttttgtaatgtgcactgaatttgttttcttttcaactatgttaatgatcaatactgtaaattgggtcttttgtaaacaaaaaggcaatgatgtatgcattttttttaatttgaggtagtttgtttgtatactgtttctccaaacacttaatatttcttacatcaaagcaacaaaattgtgttcagtgctgtacatttggtgtatggtaggaaataaaaattgataacgagttttg

SEQ ID NO: 978 - DNA, 4326 bp, Homo sapiens
gctgagcgcggagccgcccggtgattggtgggggcggaagggggccgggcgccagcgctgccttttctcctgccgggtagtttcgctttcctgcgcagagtctgcggaggggctcggctgcaccggggggatcgcgcctggcagaccccagaccgagcagaggcgacccagcgcgctcgggagaggctgcaccgccgcgcccccgcctagcccttccggatcctgcgcgcagaaaagtttcatttgctgtatgccatcctcgagagctgtctaggttaacgttcgcactctgtgtatataacctcgacagtcttggcacctaacgtgctgtgcgtagctgctcctttggttgaatccccaggcccttgttggggcacaaggtggcaggatgtctcagtggtacgaacttcagcagcttgactcaaaattcctggagcaggttcaccagctttatgatgacagttttcccatggaaatcagacagtacctggcacagtggttagaaaagcaagactgggagcacgctgccaatgatgtttcatttgccaccatccgttttcatgacctcctgtcacagctggatgatcaatatagtcgcttttctttggagaataacttcttgctacagcataacataaggaaaagcaagcgtaatcttcaggataattttcaggaagacccaatccagatgtctatgatcatttacagctgtctgaaggaagaaaggaaaattctggaaaacgcccagagatttaatcaggctcagtcggggaatattcagagcacagtgatgttagacaaacagaaagagcttgacagtaaagtcagaaatgtgaaggacaaggttatgtgtatagagcatgaaatcaagagcctggaagatttacaagatgaatatgacttcaaatgcaaaaccttgcagaacagagaacacgagaccaatggtgtggcaaagagtgatcagaaacaagaacagctgttactcaagaagatgtatttaatgcttgacaataagagaaaggaagtagttcacaaaataatagagttgctgaatgtcactgaacttacccagaatgccctgattaatgatgaactagtggagtggaagcggagacagcagagcgcctgtattggggggccgcccaatgcttgcttggatcagctgcagaactggttcactatagttgcggagagtctgcagcaagttcggcagcagcttaaaaagttggaggaattggaacagaaatacacctacgaacatgaccctatcacaaaaaacaaacaagtgttatgggaccgcaccttcagtcttttccagcagctcattcagagctcgtttgtggtggaaagacagccctgcatgccaacgcaccctcagaggccgctggtcttgaagacaggggtccagttcactgtgaagttgagactgttggtgaaattgcaagagctgaattataatttgaaagtcaaagtcttatttgataaagatgtgaatgagagaaatacagtaaaaggatttaggaagttcaacattttgggcacgcacacaaaagtgatgaacatggaggagtccaccaatggcagtctggcggctgaatttcggcacctgcaattgaaagaacagaaaaatgctggcaccagaacgaatgagggtcctctcatcgttactgaagagcttcactcccttagttttgaaacccaattgtgccagcctggtttggtaattgacctcgagacgacctctctgcccgttgtggtgatctccaacgtcagccagctcccgagcggttgggcctccatcctttggtacaacatgctggtggcggaacccaggaatctgtccttcttcctgactccaccatgtgcacgatgggctcagctttcagaagtgctgagttggcagttttcttctgtcaccaaaagaggtctcaatgtggaccagctgaacatgttgggagagaagcttcttggtcctaacgccagccccgatggtctcattccgtggacgaggttttgtaaggaaaatataaatgataaaaattttcccttctggctttggattgaaagcatcctagaactcattaaaaaacacctgctccctctctggaatgatgggtgcatcatgggcttcatcagcaaggagcgagagcgtgccctgttgaaggaccagcagccggggaccttcctgctgcggttcagtgagagctcccgggaaggggccatcacattcacatgggtggagcggtcccagaacggaggcgaacctgacttccatgcggttgaaccctacacgaagaaagaactttctgctgttactttccctgacatcattcgcaattacaaagtcatggctgctgagaatattcctgagaatcccctgaagtatctgtatccaaatattgacaaagaccatgcctttggaaagtattactccaggccaaaggaagcaccagagccaatggaacttgatggccctaaaggaactggatatatcaagactgagttgatttctgtgtctgaagttcacccttctagacttcagaccacagacaacctgctccccatgtctcctgaggagtttgacgaggtgtctcggatagtgggctctgtagaattcgacagtatgatgaacacagtatagagcatgaatttttttcatcttctctggcgacagttttccttctcatctgtgattccctcctgctactctgttccttcacatcctgtgtttctagggaaatgaaagaaaggccagcaaattcgctgcaacctgttgatagcaagtgaatttttctctaactcagaaacatcagttactctgaagggcatcatgcatcttactgaaggtaaaattgaaaggcattctctgaagagtgggtttcacaagtgaaaaacatccagatacacccaaagtatcaggacgagaatgagggtcctttgggaaaggagaagttaagcaacatctagcaaatgttatgcataaagtcagtgcccaactgttataggttgttggataaatcagtggttatttagggaactgcttgacgtaggaacggtaaatttctgtgggagaattcttacatgttttctttgctttaagtgtaactggcagttttccattggtttacctgtgaaatagttcaaagccaagtttatatacaattatatcagtcctctttcaaaggtagccatcatggatctggtagggggaaaatgtgtattttattacatctttcacattggctatttaaagacaaagacaaattctgtttcttgagaagagaatattagctttactgtttgttatggcttaatgacactagctaatatcaatagaaggatgtacatttccaaattcacaagttgtgtttgatatccaaagctgaatacattctgctttcatcttggtcacatacaattatttttacagttctcccaagggagttaggctattcacaaccactcattcaaaagttgaaattaaccatagatgtagataaactcagaaatttaattcatgtttcttaaatgggctactttgtcctttttgttattagggtggtatttagtctattagccacaaaattgggaaaggagtagaaaaagcagtaactgacaacttgaataatacaccagagataatatgagaatcagatcatttcaaaactcatttcctatgtaactgcattgagaactgcatatgtttcgctgatatatgtgtttttcacatttgcgaatggttccattctctctcctgtactttttccagacacttttttgagtggatgatgtttcgtgaagtatactgtatttttacctttttccttccttatcactgacacaaaaagtagattaagagatgggtttgacaaggttcttcccttttacatactgctgtctatgtggctgtatcttgtttttccactactgctaccacaactatattatcatgcaaatgctgtattcttctttggtggagataaagatttcttgagttttgttttaaaattaaagctaaagtatctgtattgcattaaatataatatgcacacagtgctttccgtggcactgcatacaatctgaggcctcctctctcagtttttatatagatggcgagaacctaagtttcagttgattttacaattgaaatgactaaaaaacaaagaagacaacattaaaacaatattgtttctaattgctgaggtttagctgtcagttctttttgccctttgggaattcggcatggtttcattttactgcactagccaagagactttacttttaagaagtattaaaattctaaaattcaaaaaaaaaaaaaaaaaa

SEQ ID NO: 979 - DNA, 4576 bp, Homo sapiens
tggcagccagtgtcggggtggcggctgggaatgggggccgctccggacttccgctgccaactacaagggggcgggtccgaggggggttagccgaagttgtaggcggggcgcgaggttctagtacccgagctcatactagggacgggaagtcgcgaccagagccattggagggcgcggggactgcaaccctaatcagagcccaaatggcgcagtgggaaatgctgcagaatcttgacagcccctttcaggatcagctgcaccagctttactcgcacagcctcctgcctgtggacattcgacagtacttggctgtctggattgaagaccagaactggcaggaagctgcacttgggagtgatgattccaaggctaccatgctattcttccacttcttggatcagctgaactatgagtgtggccgttgcagccaggacccagagtccttgttgctgcagcacaatttgcggaaattctgccgggacattcagcccttttcccaggatcctacccagttggctgagatgatctttaacctccttctggaagaaaaaagaattttgatccaggctcagagggcccaattggaacaaggagagccagttctcgaaacacctgtggagagccagcaacatgagattgaatcccggatcctggatttaagggctatgatggagaagctggtaaaatccatcagccaactgaaagaccagcaggatgtcttctgcttccgatataagatccaggccaaagggaagacaccctctctggacccccatcagaccaaagagcagaagattctgcaggaaactctcaatgaactggacaaaaggagaaaggaggtgctggatgcctccaaagcactgctaggccgattaactaccctaatcgagctactgctgccaaagttggaggagtggaaggcccagcagcaaaaagcctgcatcagagctcccattgaccacgggttggaacagctggagacatggttcacagctggagcaaagctgttgtttcacctgaggcagctgctgaaggagctgaagggactgagttgcctggttagctatcaggatgaccctctgaccaaaggggtggacctacgcaacgcccaggtcacagagttgctacagcgtctgctccacagagcctttgtggtagaaacccagccctgcatgccccaaactccccatcgacccctcatcctcaagactggcagcaagttcaccgtccgaacaaggctgctggtgagactccaggaaggcaatgagtcactgactgtggaagtctccattgacaggaatcctcctcaattacaaggcttccggaagttcaacattctgacttcaaaccagaaaactttgacccccgagaaggggcagagtcagggtttgatttgggactttggttacctgactctggtggagcaacgttcaggtggttcaggaaagggcagcaataaggggccactaggtgtgacagaggaactgcacatcatcagcttcacggtcaaatatacctaccagggtctgaagcaggagctgaaaacggacaccctccctgtggtgattatttccaacatgaaccagctctcaattgcctgggcttcagttctctggttcaatttgctcagcccaaaccttcagaaccagcagttcttctccaacccccccaaggccccctggagcttgctgggccctgctctcagttggcagttctcctcctatgttggccgaggcctcaactcagaccagctgagcatgctgagaaacaagctgttcgggcagaactgtaggactgaggatccattattgtcctgggctgacttcactaagcgagagagccctcctggcaagttaccattctggacatggctggacaaaattctggagttggtacatgaccacctgaaggatctctggaatgatggacgcatcatgggctttgtgagtcggagccaggagcgccggctgctgaagaagaccatgtctggcacctttctactgcgcttcagtgaatcgtcagaagggggcattacctgctcctgggtggagcaccaggatgatgacaaggtgctcatctactctgtgcaaccgtacacgaaggaggtgctgcagtcactcccgctgactgaaatcatccgccattaccagttgctcactgaggagaatatacctgaaaacccactgcgcttcctctatccccgaatcccccgggatgaagcttttgggtgctactaccaggagaaagttaatctccaggaacggaggaaatacctgaaacacaggctcattgtggtctctaatagacaggtggatgaactgcaacaaccgctggagcttaagccagagccagagctggagtcattagagctggaactagggctggtgccagagccagagctcagcctggacttagagccactgctgaaggcagggctggatctggggccagagctagagtctgtgctggagtccactctggagcctgtgatagagcccacactatgcatggtatcacaaacagtgccagagccagaccaaggacctgtatcacagccagtgccagagccagatttgccctgtgatctgagacatttgaacactgagccaatggaaatcttcagaaactgtgtaaagattgaagaaatcatgccgaatggtgacccactgttggctggccagaacaccgtggatgaggtttacgtctcccgccccagccacttctacactgatggacccttgatgccttctgacttctaggaaccacatttcctctgttcttttcatatctcttgcccttcctactcctcatagcatgatattgttctccaaggatgggaatcaggcatgtgtcccttccaagctgtgttaactgttcaaactcaggcctgtgtgactccattggggtgagaggtgaaagcataacatgggtacagaggggacaacaatgaatcagaacagatgctgagccataggtctaaataggatcctggaggctgcctgctgtgctgggaggtataggggtcctgggggcaggccagggcagttgacaggtacttggagggctcagggcagtggcttctttccagtatggaaggatttcaacattttaatagttggttaggctaaactggtgcatactggcattggcccttggtggggagcacagacacaggataggactccatttctttcttccattccttcatgtctaggataacttgctttcttctttcctttactcctggctcaagccctgaatttcttcttttcctgcaggggttgagagctttctgccttagcctaccatgtgaaactctaccctgaagaaagggatggataggaagtagacctctttttcttaccagtctcctcccctactctgcccctaagctggctgtacctgttcctcccccataaaatgatcctgccaatctaatgtgagtgtgaagctttgcacactagtttatgctacctagtctccactttctcaatgcttaggagacagatcactcctggaggctggggatggtaggattgctggggatttttttttttttaaacagggtctcactctgttgcccaggctagagtgcaatggtgcaatcacagctcactgcagcctcaacctcctgggttcaagcaatcctcctacctcagcctcctgggtagctagcaccatggcatgcgccaccatgccctattttttttttttaaagacagggtcttgctatattgcccaggctggtcttgaactgggctcaagtgatcctcacgccttggcctcccaaagtgctgggattataggcatgagccactgtgcttggccaggatttttttttttttttttttgagatggagtttctctcttgttgtccaggctggagtgcaatggtgtgatctcggctcactgcaacctccgccttccgggttcaagtgactctcctgcctcagcctccccagtagctgggattacagatctgcaccaccatgcccagctaattttgtatttttagtagagacggggtttctccatgttggtcaggctggtctcgaactcctgacctcaagtgatctgtccacctcggcctcccagagtgctgggattacaggcgtgagccactgttcccagcaggaatttcttttttatagtattggataaagtttggtgtttttacagaggagaagcaatgggtcttagctctttctctattatgttatcatcctcccttttttgtacaatatgttgtttacctgaaaggaaggtttctattcgttggttgtggacctggacaaagtccaagtctgtggaacttaaaaccttgaaggtctgtcataggactctggacaatctcacaccttagctattcccagggaaccccagggggcaactgacattgctccaagatgttctcctgatgtagcttgagatataaaggaaaggccctgcacaggtggctgtttcttgtctgttatgtcagaggaacagtcctgttcagaaaggggctcttctgagcagaaatggctaataaactttgtgctgatctggaaaaaaaaaaaaaaaaaaaaaaaaaaaa

SEQ ID NO: 980 - DNA, 4953 bp, Homo sapiens
ggtttccggagctgcggcggcgcagactgggagggggagccgggggttccgacgtcgcagccgagggaacaagccccaaccggatcctggacaggcaccccggcttggcgctgtctctccccctcggctcggagaggcccttcggcctgagggagcctcgccgcccgtccccggcacacgcgcagccccggcctctcggcctctgccggagaaacaggatggcccaatggaatcagctacagcagcttgacacacggtacctggagcagctccatcagctctacagtgacagcttcccaatggagctgcggcagtttctggccccttggattgagagtcaagattgggcatatgcggccagcaaagaatcacatgccactttggtgtttcataatctcctgggagagattgaccagcagtatagccgcttcctgcaagagtcgaatgttctctatcagcacaatctacgaagaatcaagcagtttcttcagagcaggtatcttgagaagccaatggagattgcccggattgtggcccggtgcctgtgggaagaatcacgccttctacagactgcagccactgcggcccagcaagggggccaggccaaccaccccacagcagccgtggtgacggagaagcagcagatgctggagcagcaccttcaggatgtccggaagagagtgcaggatctagaacagaaaatgaaagtggtagagaatctccaggatgactttgatttcaactataaaaccctcaagagtcaaggagacatgcaagatctgaatggaaacaaccagtcagtgaccaggcagaagatgcagcagctggaacagatgctcactgcgctggaccagatgcggagaagcatcgtgagtgagctggcggggcttttgtcagcgatggagtacgtgcagaaaactctcacggacgaggagctggctgactggaagaggcggcaacagattgcctgcattggaggcccgcccaacatctgcctagatcggctagaaaactggataacgtcattagcagaatctcaacttcagacccgtcaacaaattaagaaactggaggagttgcagcaaaaagtttcctacaaaggggaccccattgtacagcaccggccgatgctggaggagagaatcgtggagctgtttagaaacttaatgaaaagtgcctttgtggtggagcggcagccctgcatgcccatgcatcctgaccggcccctcgtcatcaagaccggcgtccagttcactactaaagtcaggttgctggtcaaattccctgagttgaattatcagcttaaaattaaagtgtgcattgacaaagactctggggacgttgcagctctcagaggatcccggaaatttaacattctgggcacaaacacaaaagtgatgaacatggaagaatccaacaacggcagcctctctgcagaattcaaacacttgaccctgagggagcagagatgtgggaatgggggccgagccaattgtgatgcttccctgattgtgactgaggagctgcacctgatcacctttgagaccgaggtgtatcaccaaggcctcaagattgacctagagacccactccttgccagttgtggtgatctccaacatctgtcagatgccaaatgcctgggcgtccatcctgtggtacaacatgctgaccaacaatcccaagaatgtaaacttttttaccaagcccccaattggaacctgggatcaagtggccgaggtcctgagctggcagttctcctccaccaccaagcgaggactgagcatcgagcagctgactacactggcagagaaactcttgggacctggtgtgaattattcagggtgtcagatcacatgggctaaattttgcaaagaaaacatggctggcaagggcttctccttctgggtctggctggacaatatcattgaccttgtgaaaaagtacatcctggccctttggaacgaagggtacatcatgggctttatcagtaaggagcgggagcgggccatcttgagcactaagcctccaggcaccttcctgctaagattcagtgaaagcagcaaagaaggaggcgtcactttcacttgggtggagaaggacatcagcggtaagacccagatccagtccgtggaaccatacacaaagcagcagctgaacaacatgtcatttgctgaaatcatcatgggctataagatcatggatgctaccaatatcctggtgtctccactggtctatctctatcctgacattcccaaggaggaggcattcggaaagtattgtcggccagagagccaggagcatcctgaagctgacccaggcgctgccccatacctgaagaccaagtttatctgtgtgacaccaacgacctgcagcaataccattgacctgccgatgtccccccgcactttagattcattgatgcagtttggaaataatggtgaaggtgctgaaccctcagcaggagggcagtttgagtccctcacctttgacatggagttgacctcggagtgcgctacctcccccatgtgaggagctgagaacggaagctgcagaaagatacgactgaggcgcctacctgcattctgccacccctcacacagccaaaccccagatcatctgaaactactaactttgtggttccagattttttttaatctcctacttctgctatctttgagcaatctgggcacttttaaaaatagagaaatgagtgaatgtgggtgatctgcttttatctaaatgcaaataaggatgtgttctctgagacccatgatcaggggatgtggcggggggtggctagagggagaaaaaggaaatgtcttgtgttgttttgttcccctgccctcctttctcagcagctttttgttattgttgttgttgttcttagacaagtgcctcctggtgcctgcggcatccttctgcctgtttctgtaagcaaatgccacaggccacctatagctacatactcctggcattgcactttttaaccttgctgacatccaaatagaagataggactatctaagccctaggtttctttttaaattaagaaataataacaattaaagggcaaaaaacactgtatcagcatagcctttctgtatttaagaaacttaagcagccgggcatggtggctcacgcctgtaatcccagcactttgggaggccgaggcggatcataaggtcaggagatcaagaccatcctggctaacacggtgaaaccccgtctctactaaaagtacaaaaaattagctgggtgtggtggtgggcgcctgtagtcccagctactcgggaggctgaggcaggagaatcgcttgaacctgagaggcggaggttgcagtgagccaaaattgcaccactgcacactgcactccatcctgggcgacagtctgagactctgtctcaaaaaaaaaaaaaaaaaaaagaaacttcagttaacagcctccttggtgctttaagcattcagcttccttcaggctggtaatttatataatccctgaaacgggcttcaggtcaaacccttaagacatctgaagctgcaacctggcctttggtgttgaaataggaaggtttaaggagaatctaagcattttagacttttttttataaatagacttattttcctttgtaatgtattggccttttagtgagtaaggctgggcagagggtgcttacaaccttgactccctttctccctggacttgatctgctgtttcagaggctaggttgtttctgtgggtgccttatcagggctgggatacttctgattctggcttccttcctgccccaccctcccgaccccagtccccctgatcctgctagaggcatgtctccttgcgtgtctaaaggtccctcatcctgtttgttttaggaatcctggtctcaggacctcatggaagaagagggggagagagttacaggttggacatgatgcacactatggggccccagcgacgtgtctggttgagctcagggaatatggttcttagccagtttcttggtgatatccagtggcacttgtaatggcgtcttcattcagttcatgcagggcaaaggcttactgataaacttgagtctgccctcgtatgagggtgtatacctggcctccctctgaggctggtgactcctccctgctggggccccacaggtgaggcagaacagctagagggcctccccgcctgcccgccttggctggctagctcgcctctcctgtgcgtatgggaacacctagcacgtgctggatgggctgcctctgactcagaggcatggccggatttggcaactcaaaaccaccttgcctcagctgatcagagtttctgtggaattctgtttgttaaatcaaattagctggtctctgaattaagggggagacgaccttctctaagatgaacagggttcgccccagtcctcctgcctggagacagttgatgtgtcatgcagagctcttacttctccagcaacactcttcagtacataataagcttaactgataaacagaatatttagaaaggtgagacttgggcttaccattgggtttaaatcatagggacctagggcgagggttcagggcttctctggagcagatattgtcaagttcatggccttaggtagcatgtatctggtcttaactctgattgtagcaaaagttctgagaggagctgagccctgttgtggcccattaaagaacagggtcctcaggccctgcccgcttcctgtccactgccccctccccatccccagcccagccgagggaatcccgtgggttgcttacctacctataaggtggtttataagctgctgtcctggccactgcattcaaattccaatgtgtacttcatagtgtaaaaatttatattattgtgaggttttttgtcttttttttttttttttttttttggtatattgctgtatctactttaacttccagaaataaacgttatataggaaccgtaaaaa

SEQ ID NO: 981 - DNA, 2761 bp, Homo sapiens
agaggacgcccggtgaaggggctccagcctggcagtttctgcgtgttagcatttctagaatagagtgggtgggaactgacccaagtaaagtcccagagactcgaacactgacgcacaggaaagcctcaagtgggaggagaaatgcaaatcccctactgatgatggcgtcagcggctttctcctagggactgtgaggggcgcttctgactttggacttgagcactgcctgggacctgtgctgagagagcgctagcatgtctcagtggaatcaagtccaacagttagaaatcaagtttttggagcaggtggatcaattctatgatgacaactttcccatggaaattcggcatctgttggcccaatggattgaaaatcaagactgggaggcagcttctaacaatgaaaccatggcaacgattcttcttcaaaacttgttaatacaactggatgaacagttaggtcgtgtttccaaagagaaaaacctactcttgatacacaatctaaaaagaattaggaaggtccttcagggaaaatttcatggaaatccaatgcatgtagctgtggttatttcaaactgtttaagggaagagaggagaatattggctgcagccaacatgcctgtccaggggcctctagagaaatccttacaaagttcttcagtttcagaaagacagaggaatgtggagcacaaagtggctgccattaaaaacagtgtgcagatgacagaacaagataccaaatacttagaagatctgcaagacgaatttgactacaggtataaaacaattcagacaatggatcagagtgacaagaatagtgccatggtgaatcaggaagttttgacactgcaggaaatgcttaacagcctcgatttcaagagaaaggaggctctcagtaaaatgacccaaatcatccatgagacagacctgttaatgaacaccatgctcatagaagagctgcaagactggaagcggcggcagcaaatcgcctgcatcgggggtccactccacaatgggctcgaccagcttcagaactgctttacactattggcagaaagtcttttccaactgagaaggcaattggagaaactagaggagcaatctaccaaaatgacatatgaaggtgatcccattccaatgcaaagaactcacatgctagaaagagtcaccttcttgatctacaaccttttcaagaactcatttgtggttgagcgacagccatgtatgccaacccaccctcagaggccgttggtacttaaaaccctaattcagttcactgtaaaactaaggctactaataaaattgccagaactaaactatcaggtaaaggttaaggcatcaattgacaagaatgtttcaactctaagcaaccgaagatttgtactttgtggaactaatgtcaaagccatgtctattgaagaatcttccaatgggagtctctcagtagaatttcgacatttgcaaccaaaggaaatgaagtccagtgctggaggtaaaggaaatgagggctgtcacatggtgactgaagaacttcattccataacgtttgaaacacagatctgcctctatggcctgaccatagatttggagaccagctcattgcctgtggtgatgatttccaatgtcagtcagttacctaatgcttgggcatccatcatttggtacaacgtgtcaaccaacgattcccagaacttggttttctttaataatcctccacctgccacattgagtcaactactggaggtgatgagctggcagttttcatcgtacgttggtcgtggtcttaactcagatcaactccatatgctggcagagaagcttacagtccaatctagctacagtgatggtcacctcacctgggccaagttctgcaaggaacatttacctggtaaatcatttaccttttggacatggcttgaagcaatattggatctaattaagaaacacattcttcccctttggattgatgggtatgtcatgggctttgttagcaaagagaaggaacggctgttgctaaaggataaaatgcctggcacctttttattaagattcagtgaaagccatctcggaggaataactttcacctgggtggaccattctgaaagtggggaagtgagattccactctgtagaaccctacaataaaggccggttgtctgctctgccattcgctgacatcctgcgagactacaaagttattatggctgaaaacattcctgaaaaccctctgaagtacctatatcctgacattcccaaagacaaagccttcggtaaacactacagctctcagccttgcgaagtttcaagaccaacagaaaggggtgacaaaggttatgttccttctgtttttatccccatctcaacaatccgaagtgattcaacagagccacattctccatcagaccttcttcccatgtctccaagtgtgtatgcggtgttgagagaaaacctgagtcccacaacaattgaaactgcaatgaagtctccttattctgctgaatgacaggataaactctgacgcaccaagaaaggaagcaaatgaaaaagtttaaagactgttctttgcccaataaccacattttatttcttcagctttgtaaataccaggttctaggaaatgtttgacatctgaagctctcttcacactcccgtggcactcctcaattgggagtgttgtgactgaaatgcttgaaaccaaagcttcagataaacttgcaagataagacaactttaagaaaccagtgttaataacaatattaacag

SEQ ID NO: 982 - DNA, 4314 bp, Homo sapiens
agacaggatattcactgctgtggcaaggcctgtagagagtttcgaagttaggaggactcaagacggtccctccctggacttttctgaaggggctcaaaagatgacacgcgccagagctggaaggcgtcgccaattggtccacttttccctcctccctttttgcggatgagaaaactgaggcccaggtttgggatttccagagcccgggatttcccggcaacgcccgacaaccacattcccccggctattctgacccgccccggttccgggacgctccctgggagccgccgccgagggcctgctgggactcccgggggaccccgccgtcggggcagcccccacgcccggcgccgcccgccgggaacggccgccgctgttgcgcacttgcaggggagccggcgactgagggcgaggcagggagggagcaagcggggctgggagggctgctggcgcgggctcgcgcgctgtgtatggtctatcgcaggcagctgacctttgaggaggaaatcgctgctctccgctccttcctgtagtaacagccgccgctgccgccgccgccaggaaccccggccgggagcgagagccgcggggcgcagagccggcccggctgccggacggtgcggccccaccaggtgaacggccatggcgggctggatccaggcccagcagctgcagggagacgcgctgcgccagatgcaggtgctgtacggccagcacttccccatcgaggtccggcactacttggcccagtggattgagagccagccatgggatgccattgacttggacaatccccaggacagagcccaagccacccagctcctggagggcctggtgcaggagctgcagaagaaggcggagcaccaggtgggggaagatgggtttttactgaagatcaagctggggcactacgccacgcagctccagaaaacatatgaccgctgccccctggagctggtccgctgcatccggcacattctgtacaatgaacagaggctggtccgagaagccaacaattgcagctctccggctgggatcctggttgacgccatgtcccagaagcaccttcagatcaaccagacatttgaggagctgcgactggtcacgcaggacacagagaatgagctgaagaaactgcagcagactcaggagtacttcatcatccagtaccaggagagcctgaggatccaagctcagtttgcccagctggcccagctgagcccccaggagcgtctgagccgggagacggccctccagcagaagcaggtgtctctggaggcctggttgcagcgtgaggcacagacactgcagcagtaccgcgtggagctggccgagaagcaccagaagaccctgcagctgctgcggaagcagcagaccatcatcctggatgacgagctgatccagtggaagcggcggcagcagctggccgggaacggcgggccccccgagggcagcctggacgtgctacagtcctggtgtgagaagttggccgagatcatctggcagaaccggcagcagatccgcagggctgagcacctctgccagcagctgcccatccccggcccagtggaggagatgctggccgaggtcaacgccaccatcacggacattatctcagccctggtgaccagcacattcatcattgagaagcagcctcctcaggtcctgaagacccagaccaagtttgcagccaccgtacgcctgctggtgggcgggaagctgaacgtgcacatgaatcccccccaggtgaaggccaccatcatcagtgagcagcaggccaagtctctgcttaaaaatgagaacacccgcaacgagtgcagtggtgagatcctgaacaactgctgcgtgatggagtaccaccaagccacgggcaccctcagtgcccacttcaggaacatgtcactgaagaggatcaagcgtgctgaccggcggggtgcagagtccgtgacagaggagaagttcacagtcctgtttgagtctcagttcagtgttggcagcaatgagcttgtgttccaggtgaagactctgtccctacctgtggttgtcatcgtccacggcagccaggaccacaatgccacggctactgtgctgtgggacaatgcctttgctgagccgggcagggtgccatttgccgtgcctgacaaagtgctgtggccgcagctgtgtgaggcgctcaacatgaaattcaaggccgaagtgcagagcaaccggggcctgaccaaggagaacctcgtgttcctggcgcagaaactgttcaacaacagcagcagccacctggaggactacagtggcctgtccgtgtcctggtcccagttcaacagggagaacttgccgggctggaactacaccttctggcagtggtttgacggggtgatggaggtgttgaagaagcaccacaagccccactggaatgatggggccatcctaggttttgtgaataagcaacaggcccacgacctgctcatcaacaagcccgacgggaccttcttgttgcgctttagtgactcagaaatcgggggcatcaccatcgcctggaagtttgactccccggaacgcaacctgtggaacctgaaaccattcaccacgcgggatttctccatcaggtccctggctgaccggctgggggacctgagctatctcatctatgtgtttcctgaccgccccaaggatgaggtcttctccaagtactacactcctgtgctggctaaagctgttgatggatatgtgaaaccacagatcaagcaagtggtccctgagtttgtgaatgcatctgcagatgctgggggcagcagcgccacgtacatggaccaggccccctccccagctgtgtgcccccaggctccctataacatgtacccacagaaccctgaccatgtactcgatcaggatggagaattcgacctggatgagaccatggatgtggccaggcacgtggaggaactcttacgccgaccaatggacagtcttgactcccgcctctcgccccctgccggtcttttcacctctgccagaggctccctctcatgaatgtttgaatcccacgcttctctttggaaacaatatgcaatgtgaagcggtcgtgttgtgagtttagtaaggctgtgtacactgacacctttgcaggcatgcatgtgcttgtgtgtgtgtgtgtgtgtgtgtccttgtgcatgagctacgcctgcctcccctgtgcagtcctgggatgtggctgcagcagcggtggcctcttttcagatcatggcatccaagagtgcgccgagtctgtctctgtcatggtagagaccgagcctctgtcactgcaggcactcaatgcagccagacctattcctcctgggcccctcatctgctcagcagctatttgaatgagatgattcagaaggggaggggagacaggtaacgtctgtaagctgaagtttcactccggagtgagaagctttgccctcctaagagagagagacagagagacagagagagagaaagagagagtgtgtgggtctatgtaaatgcatctgtcctcatgtgttgatgtaaccgattcatctctcagaagggaggctggggttcattttcgagtagtattttatactttagtgaacgtggactccagactctctgtgaaccctatgagagcgcgtctgggcccggccatgtccttagcacaggggggccgccggtttgagtgagggtttctgagctgctctgaattagtccttgcttggctgcttggccttgggcttcattcaagtctatgatgctgttgcccacgtttcccgggatatatattctctcccctccgttgggccccagccttctttgcttgcctctctgtttgtaaccttgtcgacaaagaggtagaaaagattgggtctaggatatggtgggtggacaggggccccgggacttggagggttggtcctcttgcctcctggaaaaaacaaaaacaaaaaactgcagtgaaagacaagctgcaaatcagccatgtgctgcgtgcctgtggaatctggagtgaggggtaaaagctgatctggtttgactccgctggaggtggggcctggagcaggccttgcgctgttgcgtaactggctgtgttctggtgaggccttgctcccaaccccacacgctcctccctctgaggctgtaggactcgcagtcaggggcagctgaccatggaagattgagagcccaaggtttaaacttctctgaagggaggtggggatgagaagaggggtttttttgtactttgtacaaagaccacacatttgtgtaaacagtgttttggaataaaatatttttttcataaaaaaaaaaaaaaaa

SEQ ID NO: 983 - DNA, 5171 bp, Homo sapiens
ggcgggaggagagtcggcggccggagccgtcaccccgggcggggacccagcgcaggcaactccgcgcggcggcccggccgagggagggagcgagcgggcgggcgggcaagccagacagctgggccggagcagccgcgggcgcccgaggggccgagcgagattgtaaaccatggctgtgtggatacaagctcagcagctccaaggagaagcccttcatcagatgcaagcgttatatggccagcattttcccattgaggtgcggcattatttatcccagtggattgaaagccaagcatgggactcagtagatcttgataatccacaggagaacattaaggccacccagctcctggagggcctggtgcaggagctgcagaagaaggcagagcaccaggtgggggaagatgggtttttactgaagatcaagctggggcactatgccacacagctccagaacacgtatgaccgctgccccatggagctggtccgctgcatccgccatatattgtacaatgaacagaggttggtccgagaagccaacaatggtagctctccagctggaagccttgctgatgccatgtcccagaaacacctccagatcaaccagacgtttgaggagctgcgactggtcacgcaggacacagagaatgagttaaaaaagctgcagcagactcaggagtacttcatcatccagtaccaggagagcctgaggatccaagctcagtttggcccgctggcccagctgagcccccaggagcgtctgagccgggagacggccctccagcagaagcaggtgtctctggaggcctggttgcagcgtgaggcacagacactgcagcagtaccgcgtggagctggccgagaagcaccagaagaccctgcagctgctgcggaagcagcagaccatcatcctggatgacgagctgatccagtggaagcggcggcagcagctggccgggaacggcgggccccccgagggcagcctggacgtgctacagtcctggtgtgagaagttggccgagatcatctggcagaaccggcagcagatccgcagggctgagcacctctgccagcagctgcccatccccggcccagtggaggagatgctggccgaggtcaacgccaccatcacggacattatctcagccctggtgaccagcacgttcatcattgagaagcagcctcctcaggtcctgaagacccagaccaagtttgcagccactgtgcgcctgctggtgggcgggaagctgaacgtgcacatgaaccccccccaggtgaaggccaccatcatcagtgagcagcaggccaagtctctgctcaagaacgagaacacccgcaatgattacagtggcgagatcttgaacaactgctgcgtcatggagtaccaccaagccacaggcacccttagtgcccacttcaggaatatgtccctgaaacgaattaagaggtcagaccgtcgtggggcagagtcggtgacagaagaaaaatttacaatcctgtttgaatcccagttcagtgttggtggaaatgagctggtttttcaagtcaagaccctgtccctgccagtggtggtgatcgttcatggcagccaggacaacaatgcgacggccactgttctctgggacaatgcttttgcagagcctggcagggtgccatttgccgtgcctgacaaagtgctgtggccacagctgtgtgaggcgctcaacatgaaattcaaggccgaagtgcagagcaaccggggcctgaccaaggagaacctcgtgttcctggcgcagaaactgttcaacaacagcagcagccacctggaggactacagtggcctgtctgtgtcctggtcccagttcaacagggagaatttaccaggacggaattacactttctggcaatggtttgacggtgtgatggaagtgttaaaaaaacatctcaagcctcattggaatgatggggccattttggggtttgtaaacaagcaacaggcccatgacctactcattaacaagccagatgggaccttcctcctgagattcagtgactcagaaattggcggcatcaccattgcttggaagtttgattctcaggaaagaatgttttggaatctgatgccttttaccaccagagacttctccattcggtccctagccgaccgcttgggagacttgaattaccttatctacgtgtttcctgatcggccaaaagatgaagtatactccaaatactacacaccagttccctgcgagtctgctactgctaaagctgttgatggatacgtgaagccacagatcaagcaagtggtccctgagtttgtgaacgcatctgcagatgccgggggcggcagcgccacgtacatggaccaggccccctccccagctgtgtgtccccaggctcactataacatgtacccacagaaccctgactcagtccttgacaccgatggggacttcgatctggaggacacaatggacgtagcgcggcgtgtggaggagctcctgggccggccaatggacagtcagtggatcccgcacgcacaatcgtgaccccgcgacctctccatcttcagcttcttcatcttcaccagaggaatcactcttgtggatgttttaattccatgaatcgcttctcttttgaaacaatactcataatgtgaagtgttaatactagttgtgaccttagtgtttctgtgcatggtggcaccagcgaagggagtgcgagtatgtgtttgtgtgtgtgtgtgtgtgtgtgtgtgtgtgcgtgtttgcacgttatggtgtttctccctctcactgtctgagagtttagttgtagcagaggggccacagacagaagctgtggtggtttttactttgtgcaaaaaggcagtgagtttcgtgaagcctggaagttggccatgtgtcttaagagtggctggactttgacatgtggctgtttgaataagagaaggacaaagggaggagaaagcacatgtgctccagtgagtcttcgtcactctgtctgccaagcaattgatatataaccgtgattgtctctgcttttcttctgaaatgtagataactgctttttgacaaagagagccttccctctcccccacccctgtgttcttgggtaggaatgggaaaaggggcaacctacaaagattgttggggcaagggaagtcacaagctttcggatgggcggtggcttttcacaaaacatttagctcatcttattctctctttgtcctctctcccctcctgcccgcccgcaccctggaattgccactcagttcctctgggtgtgcacatatgtttggagaaatagaggagagaaaagagggccacgtaactgagagcttacagtgccaatgccgtttgtgttctggccagagtggagtgcgcagccctgactcccaggcgctgagattgttgcctggttacccaggaagctgctgttccggctgcccagcctttctctgagccagcggatgcacagtccgtggccttcttcaggcttattgatgatgctttttgcaaatgttgaatcatggttctgtttctaagttggatcttttttgttttctccttgccaccctaatttgacatcaaaattctctcttgtgcattgggccctgggtcattcaaacccaggtcacctcattccccttctctgttcacacctaatgtcttgaagagtaggtagcagcagtgtgggctgaacctaggccagcttgcttagcgggtcaccctgctgtgaagtcctggcaggtgttggtaatgtgtggaaatgcagtcagcaagtttgctggggagtttgataaaagtataaaacaaaacaaaaaaagcctcggtataattttgttccacgacttcttctgtagctttacaccagaaggaaggaatgggctacagcaggtagtggaggaagaggggggtgagcaggtgtattaaaatagcttacgggtaaggcctaaaaggtcacccctcggccccctctccaaaagaagggcatgggcacccccaggagaggatggccccaaaaaccttatttttatacatgagagtaaataaacatattttttttacaaaaataacttctgaatttatcagtgttttgccgttaaaaatattcctctatagtaaattatttattggaagatgacttttttaaagctgccgtttgccttggcttggtttcatacactgatttatttttctatgccaggcagtagagtctctctgcctctgaggagcaggctacccgcatcccactcagcccctccctacccctcaagatttgatgaaaattccaaccatgaggatgggtgcatcggggaagggtgagaaggagagcctgcctgctcagggatccaggctcgtagagtcactccctgcccgtctcccagagatgcttcaccagcacctgcctctgagacctcgctctctgttccagcaaccctggttggggggtcagacttgatacactttcaggttgggagtggacccaccccagggcctgctgaggacagagcagccaggccgtcctggctcactttgcagttggcactgggttggggaggaagagagctgatgagtgtggcttccctgagctggggtttccctgcttgtccagttgtgagctgtcctcggtgttaccgaggctgtgcctagagagtggagatttttgatgaaaggtgtgctcgctctctgcgttctatcttctctctcctccttgttcctgcaaaccacaagataaaggtagtggtgtgtctcgaccccatcagcctctcacccactcccagacacacacaagtcctcaaaagtttcagctccgtgtgtgagatgtgcaggttttttctagggggtagggggagactaaaatcgaatataacttaaaatgaaagtatactttttataatttttctttttaaaacttggtgaaattatttcagatacatattttagtgtcaaggcagattagttatttagccaccaaaaaaaagtattgtgtacaatttggggcctcaaatttgactctgcctcaaaaaaaagaaatatatcctatgcagagttacagtcacaaagttgtgtattttatgttacaataaagccttcctctgaagggaaaaaaaaaaaaaaaaaaaaaaaaaaaaaaaaaaaaaaaaaaaaaaaaaaaaaaaaaaaaaaaaaaaaaaaaaaaaaa

SEQ ID NO: 984 - DNA, 3993 bp, Homo sapiens
ccggaaacagcgggctggggcagccactgcttacactgaagagggaggacgggagaggagtgtgtgtgtgtgtgtgtgtgtgtgtgtgtatgtatgtgtgtgctttatcttatttttctttttggtggtggtggtggaaggggggaggtgctagcagggccagccttgaactcgctggacagagctacagacctatggggcctggaagtgcccgctgagaaagggagaagacagcagaggggttgccgaggcaacctccaagtcccagatcatgtctctgtggggtctggtctccaagatgcccccagaaaaagtgcagcggctctatgtcgactttccccaacacctgcggcatcttctgggtgactggctggagagccagccctgggagttcctggtcggctccgacgccttctgctgcaacttggctagtgccctactttcagacactgtccagcaccttcaggcctcggtgggagagcagggggaggggagcaccatcttgcaacacatcagcacccttgagagcatatatcagagggaccccctgaagctggtggccactttcagacaaatacttcaaggagagaaaaaagctgttatggaacagttccgccacttgccaatgcctttccactggaagcaggaagaactcaagtttaagacaggcttgcggaggctgcagcaccgagtaggggagatccaccttctccgagaagccctgcagaagggggctgaggctggccaagtgtctctgcacagcttgatagaaactcctgctaatgggactgggccaagtgaggccctggccatgctactgcaggagaccactggagagctagaggcagccaaagccctagtgctgaagaggatccagatttggaaacggcagcagcagctggcagggaatggcgcaccgtttgaggagagcctggccccactccaggagaggtgtgaaagcctggtggacatttattcccagctacagcaggaggtaggggcggctggtggggagcttgagcccaagacccgggcatcgctgactggccggctggatgaagtcctgagaaccctcgtcaccagttgcttcctggtggagaagcagcccccccaggtactgaagactcagaccaagttccaggctggagttcgattcctgttgggcttgaggttcctgggggccccagccaagcctccgctggtcagggccgacatggtgacagagaagcaggcgcgggagctgagtgtgcctcagggtcctggggctggagcagaaagcactggagaaatcatcaacaacactgtgcccttggagaacagcattcctgggaactgctgctctgccctgttcaagaacctgcttctcaagaagatcaagcggtgtgagcggaagggcactgagtctgtcacagaggagaagtgcgctgtgctcttctctgccagcttcacacttggccccggcaaactccccatccagctccaggccctgtctctgcccctggtggtcatcgtccatggcaaccaagacaacaatgccaaagccactatcctgtgggacaatgccttctctgagatggaccgcgtgccctttgtggtggctgagcgggtgccctgggagaagatgtgtgaaactctgaacctgaagttcatggctgaggtggggaccaaccgggggctgctcccagagcacttcctcttcctggcccagaagatcttcaatgacaacagcctcagtatggaggccttccagcaccgttctgtgtcctggtcgcagttcaacaaggagatcctgctgggccgtggcttcaccttttggcagtggtttgatggtgtcctggacctcaccaaacgctgtctccggagctactggtctgaccggctgatcattggcttcatcagcaaacagtacgttactagccttcttctcaatgagcccgacggaacctttctcctccgcttcagcgactcagagattgggggcatcaccattgcccatgtcatccggggccaggatggctctccacagatagagaacatccagccattctctgccaaagacctgtccattcgctcactgggggaccgaatccgggatcttgctcagctcaaaaatctctatcccaagaagcccaaggatgaggctttccggagccactacaagcctgaacagatgggtaaggatggcaggggttatgtcccagctaccatcaagatgaccgtggaaagggaccaaccacttcctaccccagagctccagatgcctaccatggtgccttcttatgaccttggaatggcccctgattcctccatgagcatgcagcttggcccagatatggtgccccaggtgtacccaccacactctcactccatccccccgtatcaaggcctctccccagaagaatcagtcaacgtgttgtcagccttccaggagcctcacctgcagatgccccccagcctgggccagatgagcctgccctttgaccagcctcacccccagggcctgctgccgtgccagcctcaggagcatgctgtgtccagccctgaccccctgctctgctcagatgtgaccatggtggaagacagctgcctgagccagccagtgacagcgtttcctcagggcacttggattggtgaagacatattccctcctctgctgcctcccactgaacaggacctcactaagcttctcctggaggggcaaggggagtcggggggagggtccttgggggcacagcccctcctgcagccctcccactatgggcaatctgggatctcaatgtcccacatggacctaagggccaaccccagttggtgatcccagctggagggagaacccaaagagacagctcttctactacccccacagacctgctctggacacttgctcatgccctgccaagcagcagatggggagggtgccctcctatccccacctactcctgggtcaggaggaaaagactaacaggagaatgcacagtgggtggagccaatccactccttcctttctatcattcccctgcccacctccttccagcactgactggaagggaagttcaggctctgagacacgccccaacatgcctgcacctgcagcgcgcacacgcacgcacacacacatacagagctctctgagggtgatggggctgagcaggaggggggctgggtaagagcacaggttagggcatggaaggcttctccgcccattctgacccagggcctaggacggataggcaggaacatacagacacatttacactagaggccagggatagaggatattgggtctcagccctaggggaatgggaagcagctcaagggaccctgggtgggagcataggaggggtctggacatgtggttactagtacaggttttgccctgattaaaaaatctcccaaagccccaaattcctgttagccaggtggaggcttctgatacgtgtatgagactatgcaaaagtacaagggctgagattcttcgtgtatagctgtgtgaacgtgtatgtacctaggatatgttaaatgtatagctggcaccttagttgcatgaccacatagaacatgtgtctatctgcttttgcctacgtgacaacacaaatttgggagggtgagacactgcacagaagacagcagcaagtgtgctggcctctctgacatatgctaacccccaaatactctgaatttggagtctgactgtgcccaagtgggtccaagtggctgtgacatctacgtatggctccacacctccaatgctgcctgggagccagggtgagagtctgggtccaggcctggccatgtggccctccagtgtatgagagggccctgcctgctgcatcttttctgttgccccatccaccgccagcttcccttcactcccctatcccattctccctctcaaggcaggggtcatagatcctaagccataaaataaattttattccaaaataacaaaataaataatctactgtacacaatctgaaaaaaaaaaaaaaaaaa

SEQ ID NO: 985 - DNA, 4684 bp, Homo sapiens
ggcagaccgtcacgtgacgacgtcgattcgcgtgcggcagtggcgaagttgacaaaccccgcgaaaatcgactctttgcatcgcacattttgttgattttccctcgtttttctttctctctttcccccgtccatccgaaagagggttggaaaaaaacaaaacaaacaaacaaacaaaaaaaaaacctaacgctgttgggacccggaagcggaaagggcatctttgaggtcgatacttccgggtcattgggagagtgcgggattcctgggccgagagcgggtggctgagccgggacctcgcgtgattctcggaacccgaggagaagcggcgtccggggctatggctgtgactctggacaaagacgcttattatcggcgagtgaagagactgtacagcaattggcggaaaggagaagatgagtatgccaacgttgatgccattgttgtatcagtgggtgttgatgaagaaattgtttatgccaaatcaactgccttacagacatggctctttggttatgaactaactgatactatcatggtcttttgtgatgacaaaatcatctttatggccagcaagaaaaaagtggagttcttgaaacagattgccaacactaagggcaatgagaatgctaatggagcccctgccatcacactgctaatacgagaaaagaatgaaagtaataagagtagctttgacaaaatgattgaagccattaaagaaagcaagaatggcaagaagattggagtgttcagcaaagacaaattccctggagagttcatgaagagctggaatgactgcctcaacaaagaaggctttgacaaaatagatatcagtgcagttgtggcatataccatcgctgtaaaggaggatggggagctcaacctaatgaagaaagcagccagcatcacttctgaagtcttcaacaaattcttcaaggaaagagtcatggaaatagttgatgcagatgagaaagttcgacacagcaaactggctgagtctgtggaaaaggccattgaagagaaaaaataccttgctggggcagacccttctactgtggaaatgtgttaccctcctatcattcagagtggtggcaactataatctcaagttcagtgtggtgagtgacaagaatcatatgcactttggggctatcacttgtgccatgggtattcgcttcaagtcttactgctccaaccttgttcgcactttgatggttgatccttctcaagaagttcaagaaaattataactttttgctccagcttcaagaggagctgctgaaggaattaagacatggtgtgaagatatgtgacgtgtataacgctgtcatggacgtggttaaaaagcagaagccagaactgctgaacaaaattaccaaaaacctagggtttgggatgggaattgaattccgtgaaggctccctagtaatcaatagcaaaaatcaatacaaactgaagaaaggaatggttttcagcatcaatttaggattctcagacctgactaacaaggaggggaaaaagccagaagagaaaacctatgccctgttcattggtgacacagtgcttgtggatgaggatggcccagctactgttctcacttctgtgaagaagaaagtgaagaatgtggggattttcctaaagaatgaagatgaggaagaagaggaggaggagaaagatgaggcagaggaccttttgggaagaggttctcgggcagcattacttacagaaagaacaagaaatgaaatgactgcagaagagaagcgaagagcacatcagaaagaactagcggctcaactcaatgaagaagcaaagaggcgattgactgaacaaaagggagaacagcagattcagaaagctcgcaagtctaatgtgtcctataaaaacccatctctgatgcctaaggaaccacatattcgggaaatgaagatctacatcgataagaaatatgagactgtaataatgcccgtgtttggcattgcaacaccgtttcacattgccacaatcaagaatataagtatgtccgtggaaggagattatacttacttgcgaatcaacttttattgcccaggcagtgctctgggcaggaatgaaggcaacatctttcctaaccctgaagcgacttttgtcaaggaaattacataccgagcatcaaatattaaggcacccggagaacagacagtaccagccttgaaccttcagaatgctttccgaattattaaagaagtacagaaacgttataaaactcgagaagctgaagagaaagagaaggaggggattgtaaaacaagactcactggtgatcaatctaaaccggagtaatccgaaactgaaagatctatacattcgcccaaatattgcccaaaagaggatgcaaggctcactggaggcccatgtcaatggcttccgcttcacatctgttcgaggagacaaagtggatattttgtacaataatattaagcatgctttgttccagccctgtgatggagaaatgattattgtcttgcactttcacctcaagaatgccatcatgtttgggaagaagcggcacacggatgtgcagttctacacagaagtgggagagataaccacggacttggggaaacatcagcatatgcatgaccgagatgacctctatgctgagcagatggaacgagaaatgaggcacaaactgaaaacagcctttaaaaatttcattgagaaagtagaggctctaactaaggaggaactggaatttgaagtgccttttagggacttgggatttaacggagctccctataggagtacctgcctccttcagcccactagtagtgcgctggtaaatgctacggaatggccaccttttgtggtgacattggatgaggtagagctgatccactttgagcgggtccagtttcacctgaagaactttgatatggtaatcgtctacaaggactacagcaagaaagtgaccatgatcaacgccattcctgtagcctctcttgaccccatcaaggaatggttgaattcctgcgacctgaaatacacagaaggagtacagtccctcaactggactaaaatcatgaagaccattgttgatgaccctgagggcttcttcgaacaaggtggctggtctttcctggagcctgagggtgaggggagtgatgctgaagaaggggattcagagtctgaaattgaagatgagacttttaatccttcagaagatgactatgaagaggaagaggaggacagtgatgaagattattcatcagaagcagaagagtcagactattctaaggagtcattgggtagtgaagaagagagtggaaaggattgggatgaactggaggaagaagcccgaaaagcggaccgagaaagtcgttacgaggaagaagaagaacaaagtcgaagtatgagccggaagaggaaggcatctgtgcacagttcgggccgtggctctaaccgtggttccagacacagctctgcaccccccaagaaaaagaggaagtaacttctgaactttggccctgagctccattcttcctccagccaacccctgaaaattttacatgacatagaaactgtatttttcctttcgttttcatttgaagttttgccatttgtgtttatgggtttagggggccatttgtgtggaccaatctactcggggaattccaggcccaccaggacacgtgccaatggccccattcagatggcaagggaggaggtgttcttgaagacaggaggaggctcccgctgttaataaatattgtttcattcttctctcttcctgtcaccttctgccaagacattgatggcttctgacatcttatttggtgtctcaaagctgtatttccaagacagtggtacaaggtgacccttaattacccgtatcatggttcttgaccagcacattcaatcctccaacctaccctactgccatgaccttccgcacatctctaagttttatctttgcaatactcaaggttctcggaaatttgctaatggttgtgataaaccatacagcttgagccagtgaggcagattgggctggtgccttcgtctgagttttcctgctttcctgcctcgtgcagattctgaggtatatctgctgccttggaagacataagaagcagtgatactccctggctcggttattttctccatacaatgcacacatggtacaatgatagaaggcaaaattgccactgtcttcttttttttctcatatatctaaggaagatatatcaggttgtgcctcatgtaccgcttctagtgaaatgtagaggaaggctcaaaggagtcaacatttatatctggaagggacaagtcatgccttgggcctagaataccctgatgagaaaagagaagaggaagggaggccatatctacaacacagcctctcggcactgctgctccttattttaactttgtcttgcattgtcctgtatttatcacagtttctgttgaacagcttttcaagtatttggggagtttatcttgccatcctccccttctggttctctgcacccacctgtcccactgcagttccttccgtgctctgtgactttaagagaagaaggggggaggggtcccggattttatgtttgtttgttttttctccttagcagtaggacttgatattttcaattttggaagaactaaaagatgaataaactgggttttttttgttgtttgtttttgtaaattca

SEQ ID NO: 986 - DNA, 1164 bp, Homo sapiens
cgcaccatctgcacccccacattctcctcgcgggaagcgcagcagtgcctccaagggttcttaaagcagagatgaataatacggcagctagtccaatgtctactgcaacttcaagtagtggaaggagtacagggaagtctataagctttgcaacagaattacagagtatgatgtattctttaggtgatgctagaaggcctcttcatgaaacagcagttttggtagaagatgtggtacacactcagttaattaatctgttacagcaagctgctgaagtttctcagctgcggggagcaagggtaatcactcctgaagatcttctgtttttgatgcgcaaagataagaaaaaacttagaagactgctaaaatacatgtttatccgagactacaaatcaaagattgtcaaaggcatcgatgaggatgatcttctcgaagacaaattgagtggcagcaataatgcgaacaaaagacaaaagattgctcaggacttcctcaactctattgaccagacaggagaacttttagcaatgtttgaagatgacgaaattgatgaagttaaacaagaaagaatggagagagcagaaagacaaactcgaattatggattcagctcaatatgcagaattctgtgaaagtcgacaattaagtttctccaaaaaagcttccaaatttcgagactggttggactgcagcagtatggagataaaacccaatgttgtcgcaatggaaatcttagcatatttagcgtatgaaactgtggcacagttagtggatctggctcttcttgtgaggcaagacatggtaaccaaggcaggggaccccttcagccatgccatttctgcaaccttcattcagtatcacaactctgctgagagcactgcagcctgtggtgttgaggctcacagcgatgccatccagccctgccacatcagagaggccattcgacgctacagccacaggattggcccactttccccattcacaaatgcctaccgcaggaatgggatggcttttctagcctgctgatgtgacaactgtgatgtgcctgcaacaacaggaaaggcaatgttatattaaggtgatttcttgtgaacaaaataaaatacaaatttacctttcttttatctgacaaaaaaaaaaaaaaaaaaaaaaaaaaaaaaaaaaa

SEQ ID NO: 987 - DNA, 1499 bp, Homo sapiens
tatttacttcctgcgggtgcacaggctgtggtcgtctatctccctgttgttcttcccatcggcgaagatggccctggagacggtgccgaaggacctgcggcatctgcgggcctgtttgctgtgttcgctggtcaagactatagaccagtttgaatatgatggttgtgacaattgtgatgcatatctacaaatgaagggtaaccgagagatggtatatgactgcactagctcttcctttgatggaatcattgcgatgatgagtccagaggacagctgggtctccaagtggcagcgagtcagtaactttaagccaggtgtatatgcggtgtcagtcactggtcgcctgccccaaggaatcgtgcgggagctgaaaagtcgaggagtggcctacaaatccagagacacagctataaagacctagcaagatgcaaggctgccagcatctttgctctccacctcctgcctctgcttatttcttgttctggaactaaatgaacagaacttcaaatacttcctaccctccaattcagactcagctgactgttgagagagcagcacatcattttatcattttatcttctttggactacaggtggggtgggagggatttgggttggtggattaacagatggaattgaggagagagtaggatgctgattttcctacccgtggcccaggtctgtgccttccccatgccaaggactctaggtcaaatgtcaataaatatgaacctcgagaaagttctgaaggccatgacacctgccttgcctccctcttccattctcttaggcacagtaatagcttatttgccctataagaaccttcccagagcagcagaggcccttctactccctcttgactgtctcagcctctgggattgcagcctttgtagtgtgcttccttgcttcctatcagagggtgctgatccagaggctcagtaaccccatcaacttggtggccctggtgtctcacacttgtatccttctgccctcgagacctggcacagcagtatcccttgaagaaatcctgaggctttgtagagtgctccttgaccatgtttaataattcttccctcccctgcttgtctattttcttctcttcacggctcttcctataccttaggccagtctcaagcactcactggagacccttgggccttgggcgaccattgagtcctagtctcccttgtttgtgcccctgtaggaggtaggtccttttctcctccggcctagtaggggaccttgggtaacatcccatttttcggccaaggtgagttgttttaggataaaaaaatttaccacaaattctcatttaaatttccacagaaatcctgttcgtatccccattttgatttccctaagttccttgttctccctctaaaaagagaatgattgcaccctgcctgtttacctcaggattgttgtgattgtagaaacgaagctatgtgaaaattatataagtattataaaggtgaaatacttttgctctcaaaaaaaaaa

SEQ ID NO: 988 - DNA, 3798 bp, Homo sapiens
gtgcagaggtggcagttccgggcgccggggaggtgtagagaacagattcggaaactggggaggtctagcatgtggcgtaggagggggtcctcactccgcttcgcgattgccaaaacgagcctgccggaagcgccctaaggggttttcttctcccagggaaccagcggggaaactgaggctcggggtggagcgcaggattgtgggacgcgccaaggctgctgtctttcccagcagcagcggaagatgtcggacagcgaggacagcaacttttccgaggaggaggacagcgagcgcagcagtgacggcgaggaggccgaggtagacgaagagcggcggagtgcagcgggcagtgagaaagaagaagagcctgaggacgaagaggaggaggaagaggaggaggaatacgatgaggaagaggaggaagaagatgatgaccgaccccccaagaaaccccgccatggaggcttcattctggacgaggctgatgttgacgatgagtatgaggacgaggaccagtgggaggatggagcagaggacattctagagaaagaagagattgaagcctccaatatcgataatgttgtcctggatgaagatcgttctggggctcgccgcctgcaaaacctctggagggaccagcgagaagaagaactgggcgagtattacatgaagaaatacgccaagtcatctgtgggagagacggtgtatggaggatctgatgagctctcagacgacatcacccagcagcagctgctcccaggagtcaaggatcccaatctgtggactgtcaaatgtaagattggggaggaacgggccacggccatttccttgatgcgcaagttcattgcctaccagttcacagacacgcccctgcagatcaagtcagtagtggcaccagagcatgtgaagggctacatctacgtggaggcctacaagcagacccacgtgaagcaggccattgagggggtgggcaacctgcggcttggctactggaaccagcagatggtgcccatcaaggagatgacagacgtgctcaaagtggtgaaggaggtggccaacctgaaaccaaagtcctgggtccgcctcaagcggggcatctacaaggatgacattgctcaggtggactacgtggagcccagccagaacaccatctccctgaagatgatcccacgcatcgactacgatcgcatcaaggcccgcatgagcttgaaagactggtttgccaaaaggaagaagtttaagcggcctccacagaggctgtttgatgctgagaagatcaggtccctggggggtgatgttgcctctgatggtgacttcctcatctttgaggggaaccgttacagccggaagggctttctgttcaagagcttcgccatgtctgctgtgatcacggagggtgtgaagccaacactctctgagctggaaaagtttgaggaccagccagagggcattgacctggaggtggtgactgagagcacagggaaggagcgggagcacaacttccaacctggggacaacgtggaggtctgtgagggtgagctcatcaacctgcagggcaagatcctcagcgtggatggcaacaagatcaccatcatgcccaagcatgaggacctcaaggacatgttggagttcccagcccaggaacttagaaaatacttcaagatgggggaccacgtgaaggtgattgctggccgattcgagggcgacacaggcctcattgtgcgggtggaggagaatttcgttatcctgttctctgacctcaccatgcatgagctgaaggtgctcccccgggacctgcagctctgctcagagacagcatcaggtgtggatgttgggggccagcatgaatggggcgagctggtgcagctggatccccagactgtgggtgtcatcgtgcgactagaacgggagaccttccaggtgctgaacatgtacgggaaggtggtgactgtcagacatcaggctgtgacccggaagaaggacaaccgctttgctgtggccttggactcagagcagaacaacatccatgtgaaagacatcgttaaggtcattgatggcccccactcaggccgagaaggggagattcgccatctcttccgaagcttcgccttcctacattgcaagaaactggtggagaacgggggcatgtttgtctgcaagacccgccacctggtgctggctgggggctcaaagccccgtgatgtgaccaacttcaccgtgggtggctttgcgcctatgagtccccggatcagcagccccatgcaccccagtgctggaggtcagcgtggcggctttggtagcccaggtggcggcagtggtggcatgagcaggggccggggccggagggacaacgaactcatcggccagaccgtgcgcatctcccaggggccctacaaaggctacatcggtgtggtgaaagatgccacagagtccacggcccgtgtggagctgcactccacctgccagaccatctctgtggaccgtcagcggctcaccacggtgggctcacggcgcccgggcggcatgacctcgacctatgggaggacgcccatgtatggctcccagacgcccatgtatggctctggctcccgaacacccatgtacggctcacagacacccctccaggatggtagccgcaccccacactacggctcacagacgcccctgcatgatggcagccgcactcctgcccagagtggggcctgggaccccaacaaccccaacacgccgtcacgggctgaggaagaatatgagtatgctttcgatgatgagcccaccccgtccccgcaggcctatgggggaacccccaatccccaaacacctggctacccagacccctcgtccccacaggtcaacccacaatacaacccgcagacgccagggacgccggccatgtacaacacagaccagttctctccctatgctgccccctccccacaaggttcctaccagcccagccccagcccccagagctaccaccaggtggcgccaagcccagcaggctaccagaatacccactccccagccagctaccaccctacaccgtcgcccatggcctatcaggctagccccagcccgagccccgttggctacagtcctatgacacctggagctccctcccctggtggctacaacccacacacgccaggctcaggcatcgagcagaactccagcgactgggtaaccactgacattcaggtgaaggtgcgggacacctacctggatacacaggtggtgggacagacaggtgtcatccgcagtgtcacggggggcatgtgctctgtgtacctgaaggacagtgagaaggttgtcagcatttccagtgagcacctggagcctatcacccccaccaagaacaacaaggtgaaagtgatcctgggcgaggatcgggaagccacgggcgtcctactgagcattgatggtgaggatggcattgtccgtatggaccttgatgagcagctcaagatcctcaacctccgcttcctggggaagctcctggaagcctgaagcaggcagggccggtggacttcgtcggatgaagagtgatcctccttccttccctggcccttggctgtgacacaagatcctcctgcagggctaggcggattgttctggatttccttttgtttttccttttagttttccatcttttccctccctggtgctcattggaatctgagtagagtctgggggagggtccccaccttcctgtacctcctccccacagcttgcttttgttgtaccgtctttcaataaaaagaagctgtttggtctaaaaaaaaaaaaaaaaaaaaaaaa

SEQ ID NO: 989 - DNA, 5896 bp, Homo sapiens
cgactccattttcctcggtgggggcttagcgcactggaggagcggcgggcttcagacagttatcttcaggcagagtgagaagctgcagcaatgtctgattttgtggaaagcgaggctgaggagtcagaggaagaatacaatgatgaaggcgaggtggtaccccgagtcaccaagaaatttgtggaagaggaggatgatgatgaggaggaggaggaggagaacctagatgatcaggatgagcaaggcaacttgaaaggctttatcaatgacgatgatgatgaagatgaaggggaggaggatgagggcagtgactctggtgattcagaagatgatgttggccacaagaagagaaaacgcacctcttttgatgaccgcctggaggatgatgattttgacctcattgaggagaatttgggtgtcaaagtcaaaagaggacaaaagtaccggcgtgtcaaaaaaatgtcagatgacgaggacgatgacgaggaggaatatggcaaggaggaacatgaaaaagaagctattgcggaagaaatcttccaggatggggaaggggaagaagggcaggaggccatggaggcccccatggctcctccagaggaggaggaagaagatgatgaggagtcagatattgacgacttcattgtggatgatgatggacagcctctgaaaaaacctaagtggcggaaaaagcttcctggatacacagacgcggccctgcaagaagcccaggaaatcttcggtgtggactttgactatgatgaatttgagaaatacaatgagtatgatgaagaactggaggaagagtatgagtatgaggatgatgaggctgagggtgaaatccgagtgcgccccaagaagaccaccaagaagcgtgtgagccgtaggagcatctttgaaatgtatgagcccagtgagctagaaagcagccacctcacagatcaggacaatgaaatccgagccactgacctgcctgagaggttccagctccgctccatcccagtcaagggggctgaagatgatgaactagaagaagaagctgactggatctacaggaatgcttttgccacaccaaccatttctctccaggaaagctgtgattacctagaccgagggcagccagccagcagcttcagtcggaaagggcccagcacaattcagaagatcaaagaggccctgggcttcatgcgaaatcagcattttgaggtgccttttattgccttctatcgaaaggagtatgtggagcctgagttgcacatcaatgacctatggagagtctggcagtgggatgaaaagtggacccagctgcggatccgtaaagagaacctaacacggctgtttgagaagatgcaggcttatcagtatgaacagatctctgctgaccctgacaaacctcttgctgatggcatccgggctctggacaccactgacatggagaggctcaaggatgtccaatcaatggatgagctgaaagatgtctacaaccattttcttctttattatggccgagacatccctaagatgcagaacgccgccaaagctagccgcaagaagctgaagcgtgtcagggaagagggagatgaagaaggtgaaggtgacgaggcagaagatgaggagcagagggggcctgagctcaagcaagcctctcgccgagacatgtacaccatctgccagagtgctgggctagatggcctggccaaaaagtttgggcttactcccgagcagtttggggagaacctgcgggatagctaccagcggcacgagacagagcagtttcccgcggagcccttggagctggccaaggattacgtttgcagccagttccctactccagaagctgtgctagaaggcgcccgctacatggtagccctgcagattgcccgtgagccccttgtccggcaggtgctgaggcaaaccttccaagagagagccaagttaaatataacccccaccaagaaaggtagaaaggatgtggatgaggcccactatgcctattccttcaagtatttaaagaacaagcctgttaaggaactgagagatgaccagtttctcaagatatgcctggctgaagacgaagggctcctcaccactgacatcagcatagatttgaagggagtggaaggctatggcaacgaccagacatattttgaggagataaaacagttttactaccgagatgagttcagccaccaggtgcaggagtggaaccggcagcgcaccatggccatcgaacgggctttacagcagttcctctatgtgcagatggccaaagaactcaagaacaagctgctggctgaagccaaggaatatgtcataaaggcctgtagtcgaaagctctacaattggttgagagtggcaccctaccgaccagatcagcaggtggaagaagatgacgactttatggacgagaaccaagggaagggcattcgagtcctcggcattgctttctcctctgccagagatcaccctgtgttctgcgccctggtcaatggtgaaggagaagtgacagacttccttcgactgccccattttaccaaacggcgaactgcatggagagaggaagagcgggaaaagaaggctcaagacattgaaacgctaaagaaatttctcctgaataagaagcctcatgtagtgacagttgcaggagagaacagggacgcccagatgttgattgaagatgtgaagcgcattgtacatgagctggaccagggccagcagctgtcatctattggggtagagctggttgacaacgagttggccattctctatatgaacagcaagaagtcagaggcagagttccgggattatcctccagtgctgagacaggccgtctccctggcccggcgcatccaggaccctctgattgaatttgcccaggtgtgcagttccgatgaagacatcctgtgtctcaagtttcaccccttgcaggagcatgtggtgaaagaggagctgctcaacgccttgtactgtgaatttatcaaccgagtcaatgaggtcggggtcgatgtcaaccgtgccattgcccacccttacagccaggccttgatccagtatgtttgtggcctgggacctcggaaagggacccacctcctgaagatcctgaagcagaacaacacccggctcgagagccggacccagctggtcaccatgtgccacatgggtcccaaagtcttcatgaattgtgctggcttcctcaagatcgacacggcctccctgggggacagcactgactcatatattgaagtccttgatggttcccgtgtccaccctgagacttatgagtgggctaggaagatggcagtggatgccctggaatacgatgaatcagccgaggatgccaatcctgcaggagcccttgaagaaatcttggaaaacccagagcgactgaaagacctggaccttgatgcctttgcagaagagctggagaggcagggctatggtgacaaacacatcacactctatgacatccgggcagagctgagctgtcgatataaggacctccggacagcctaccgctctcccaacacagaggagatcttcaatatgttaaccaaagaaacaccagagaccttctacattggaaagctcatcatctgcaatgtcactggcattgcccacaggcgtccccagggtgagagctatgaccaggcgatccgcaatgatgagacagggctgtggcagtgccccttctgtcagcaggacaatttccctgaactaagcgaggtgtggaaccactttgacagcggttcgtgcccaggccaggccatcggtgtcaaaacacggctagacaatggtgtcaccggcttcatccccaccaaattcctcagtgacaaagtggtaaagcggccagaagaacgagtgaaggtgggaatgactgttcactgccgcatcatgaagattgacattgagaagttcagtgcagacctgacctgccgcacctcagacctcatggacaggaacaatgagtggaagctgcccaaagacacctactatgactttgatgctgaagctgcagaccacaagcaggaggaggacatgaagcggaagcagcagcggaccacatacatcaagagagtgatcgcacacccatccttccataatatcaatttcaagcaagcagaaaagatgatggagaccatggaccagggtgatgtgattatccgaccaagcagcaagggcgagaaccacctgacagtgacctggaaagtcagtgatggcatctaccagcatgtggatgtgcgggaggagggcaaggaaaatgccttcagcctgggagccactctgtggatcaacagtgaggaattcgaagatttggatgagattgttgctcgctatgtccagcccatggcatcctttgcccgggaccttctgaatcacaagtattatcaggactgcagcggtggggaccgcaagaaattagaggagctgctcatcaaaactaagaaggagaagcccaccttcatcccttatttcatctgtgcctgcaaggaactgcccggcaagttcctactgggataccagccccggggtaaacccaggatagaatatgtaacggtgactccagagggattccggtaccggggccagatcttcccaaccgtgaatggactgtttagatggtttaaggatcactaccaggatcctgtaccaggcatcacccctagcagcagcagcaggacccggacacctgcctctatcaatgctaccccagccaacatcaaccttgcagatctgacacgggctgtgaatgccctgcctcagaacatgacttcacagatgttcagtgccattgctgcggtgacaggccaaggacagaaccctaatgccaccccagcccagtgggcctccagccagtacggctatggcggcagtggaggcggcagcagtgcttaccacgtattcccaacgccagcccagcagccagtggccacaccactaatgacccctagctactcctacacgaccccaagccagcccatcaccacccctcagtaccaccagctccaggccagcaccaccccacagtcggcccaggcccagccccagccctcttccagctcccggcaacggcagcagcagccaaagtccaacagccatgcagccatcgactggggaaaaatggcggagcagtggctgcaggaaaaggaggcagaacggcggaaacagaagcagcggctgacacctcggccctcccccagccccatgatcgaaagcacccccatgtccattgctggcgatgccaccccactcctggacgagatggatcggtagggggcctgctcctcggactctggttacctctgaggctgggaaaggcctggctgcccactgcctccctccctgcccctccttttatgtccataaagtggcgtgaagtgagacgttctctttggtggtcaacccggatgggtgacaggctggatggccttgtgaacttgagctcagtgtatgctaggcaacaattctcccgctccagaccctcaccgaccacctgtcctgggaccaggctgggaggggagtgtggcagggaggaggaagaggaaggtgagaatgagtagaacagttttgtattctactccctacaagccattttgaacttctgccctcaccggactctgggctgtgactggggcaccaaactcagcacatgagtctcccctagctctcgtggggagagggatgctatttattcagtttggggcaggagggagaggagggaaagtatttctgaccctgatgccaacagccgggtggctgtccaagcaggattgcaggggacacagggaagcactgcccagcccctgcctggctgccctttcccccctgctgctgccaccgcttcctgcctgtcatttgaataaacagtgtttctattgaaaaaaaaaaaaaaaaaaaa

SEQ ID NO: 990 - DNA, 1782 bp, Homo sapiens
gttttggcgtccgtttgctgcggtaggaacatggcggatcggctcacgcagcttcaggacgctgtgaattcgcttgcagatcagttttgtaatgccattggagtattgcagcaatgtggtcctcctgcctctttcaataatattcagacagcaattaacaaagaccagccagctaaccctacagaagagtatgcccagctttttgcagcactgattgcacgaacagcaaaagacattgatgttttgatagattccttacccagtgaagaatctacagctgctttacaggctgctagcttgtataagctagaagaagaaaaccatgaagctgctacatgtctggaggatgttgtttatcgaggagacatgcttctggagaagatacaaagcgcacttgctgatattgcacagtcacagctgaagacaagaagtggtacccatagccagtctcttccagactcatagcatcagtggataccatgtggctgagaaaagaactgtttgagtgccattaagaattctgcatcagacttagatacaagccttaccaacaattacagaaacattaaacactatgacacattacctttttagctatttttaatagtcttctattttcactcttgataagcttataaaatcatgattgaatcagctttaaagcatcataccatcattttttaactgagtgaaattattaaggcatgtaatacattaatgaacataatataaggaaacatatgtaaaattctgttatgacataatttatgtctccattttgttgtattggccagtacttttacaaatcaaaacatctctcaagccaaaggagaagacagtaagaacagacataagggacattttagtttaggctagtgtcctgcctcttagaggtggcattgtgtaaatctgagctttgagcaagaaagttttggaaattgtgttgcttttaagaaatagagttagtgtggctggataagaaagtcacatttatgcaaatgtttcttctgctagaacctcatacctgttctagttcatctccacgtttattttaccaagagatcctctgtcaagagaatttcctggctgttgtgaaagaatttttctacatcctgaactatttttcctatttcttttcaccttgctttttttcatccttaatttgcttgtcatcacaatgaagtatgttttttgaatcatcaattctttctcattctccatttatctgaaggttcttttgcccttattaacctctcaacttttattgctgtattctagtcagaccagaacatacttccactacatcagttacttggcatcatttcacctcagtttattattgccaaataataatttgtgtcagcattttcaactatggttattcatccaacccttggatctctttgagtctactgataatctccactggaaaggtggaattgaaatgtggtccacattttaactagctatttcctggggctgtatttttcagaatatgctgagctacatttgctgcaatctgttgctattcagagtttaagtttcaggagaaaacaggaacaatagaacactctgcctgttatttttgttgtaatcaagcttttccacagttcttgaaaagtactatgtttcaaatttcaggaacaccagcgttagctgtaaaagttgcagcaatttattggctagtcatagaaaatttttgaacttttaactgtattttaattgatgtttattaaaaacactttgctatcaggaaaaaaaaaaaaaaaaaaaaaaaaaaaa

SEQ ID NO: 991 - DNA, 2745 bp, Homo sapiens
ctcgcgaggccggctaggcccgaatgtcgttagccgtggggaaagatggcggaaaatttaaaaggctgcagcgtgtgttgcaagtcttcttggaatcagctgcaggacctgtgccgcctggccaagctctcctgccctgccctcggtatctctaagaggaacctctatgactttgaagtcgagtacctgtgcgattacaagaagatccgcgaacaggaatattacctggtgaaatggcgtggatatccagactcagagagcacctgggagccacggcagaatctcaagtgtgtgcgtatcctcaagcagttccacaaggacttagaaagggagctgctccggcggcaccaccggtcaaagaccccccggcacctggacccaagcttggccaactacctggtgcagaaggccaagcagaggcgggcgctccgtcgctgggagcaggagctcaatgccaagcgcagccatctgggacgcatcactgtagagaatgaggtggacctggacggccctccgcgggccttcgtgtacatcaatgagtaccgtgttggtgagggcatcaccctcaaccaggtggctgtgggctgcgagtgccaggactgtctgtgggcacccactggaggctgctgcccgggggcgtcactgcacaagtttgcctacaatgaccagggccaggtgcggcttcgagccgggctgcccatctacgagtgcaactcccgctgccgctgcggctatgactgcccaaatcgtgtggtacagaagggtatccgatatgacctctgcatcttccgcacggatgatgggcgtggctggggcgtccgcaccctggagaagattcgcaagaacagcttcgtcatggagtacgtgggagagatcattacctcagaggaggcagagcggcggggccagatctacgaccgtcagggcgccacctacctctttgacctggactacgtggaggacgtgtacaccgtggatgccgcctactatggcaacatctcccactttgtcaaccacagttgtgaccccaacctgcaggtgtacaacgtcttcatagacaaccttgacgagcggctgccccgcatcgctttctttgccacaagaaccatccgggcaggcgaggagctcacctttgattacaacatgcaagtggaccccgtggacatggagagcacccgcatggactccaactttggcctggctgggctccctggctcccctaagaagcgggtccgtattgaatgcaagtgtgggactgagtcctgccgcaaatacctcttctagcccttagaagtctgaggccagactgactgagggggcctgaagctacatgcacctcccccactgctgccctcctgtcgagaatgactgccagggcctcgcctgcctccacctgcccccacctgctcctacctgctctacgttcagggctgtggccgtggtgaggaccgactccaggagtcccctttccctgtcccagccccatctgtgggttgcacttacaaacccccacccaccttcagaaatagtttttcaacatcaagactctctgtcgttgggattcatggcctattaaggaggtccaaggggtgagtcccaacccagccccagaatatatttgtttttgcacctgcttctgcctggagattgaggggtctgctgcaggcctcctccctgctgccccaaaggtatggggaagcaaccccagagcaggcagacatcagaggccagagtgcctagcccgacatgaagctggttccccaaccacagaaactttgtactagtgaaagaaagggggtccctgggctacgggctgaggctggtttctgctcgtgcttacagtgctgggtagtgttggccctaagagctgtagggtctcttcttcagggctgcatatctgagaagtggatgcccacatgccactggaagggaagtgggtgtccatgggccactgagcagtgagaggaaggcagtgcagagctggccagccctggaggtaggctgggaccaagctctgccttcacagtgcagtgaaggtacctagggctcttgggagctctgcggttgctaggggccctgacctggggtgtcatgaccgctgacaccactcagagctggaaccaagatctagatagtccgtagatagcacttaggacaagaatgtgcattgatggggtggtgatgaggtgccaggcactgggtagagcacctggtccacgtggattgtctcagggaagccttgaaaaccacggaggtggatgccaggaaagggcccatgtggcagaaggcaaagtacaggccaagaattgggggtgggggagatggcttccccactatgggatgacgaggcgagagggaagcccttgctgcctgccattcccagaccccagccctttgtgctcaccctggttccactggtctcaaaagtcacctgcctacaaatgtacaaaaggcgaaggttctgatggctgccttgctccttgctcccccaccccctgtgaggacttctctaggaagtccttcctgactacctgtgcccagagtgcccctacatgagactgtatgccctgctatcagatgccagatctatgtgtctgtctgtgtgtccatcccgccgaccccccagactaacctccaggcatggactgaatctggttctcctcttgtacacccctcaaccctatgcagcctggagtgggcatcaataaaatgaactgtcgactgaacaaaaaaaaaaaaaaaaaa

SEQ ID NO: 992 - DNA, 3399 bp, Homo sapiens
gcattctaatccgtttcacacacggtgctgctacctcgtttgcttcgtgcgtgcgtgcgcgcgcagatgtgggccccgcgggagcagctactgggctggactgcggaagctctgcctgccaaggattctgcctggccctgggaagagaagcctagatatctgggaccagtgactttcgaggatgtggctgtgcttttcactgaggcagagtggaagagactgagccttgagcagaggaacctatacaaagaagtgatgctggaaaatctcaggaatctggtctcattggcagaatcaaagccagaagtccatacctgcccttcttgccctctggcctttggcagtcagcagttcctcagccaagatgagctacacaatcatcctattccaggtttccatgcaggaaatcaactccacccaggaaatccctgcccagaggatcagccacagtcacaacatccttctgataaaaatcacaggggggctgaagcagaagatcaacgagtggaaggaggcgtcagacccttgttttggagtacaaatgaaaggggggctttagtgggtttctctagcctgttccagagaccaccaataagctcttggggaggcaacagaatattagagatacagctcagtccagcccagaatgcaagctctgaggaagtagacagaatttccaagagggcagaaaccccagggtttggagcagtcacgtttggggagtgtgcactagcttttaaccagaagtcaaacctgttcagacagaaggcagtcacagcagaaaaatcttcagacaaaaggcagtcacaggtgtgcagggagtgtgggcgaggctttagcaggaagtcacagctcatcatacaccagaggacacacacaggagaaaagccttatgtctgcggagagtgtgggcgaggctttatagttgagtcagtcctccgcaaccacctgagtacacactccggggagaaaccttatgtgtgcagccattgtgggcgaggctttagctgcaagccatacctcatcagacatcagaggacacacacaagggagaaatcgtttatgtgcacagtgtgtgggcgaggctttcgtgaaaagtcagagctcattaagcaccagagaattcacacgggggataagccttatgtgtgcagagattgaggccgaggctttgtaaggagatcatgtctcaacacacaccagaggatacattcagatgagaagccttttgtttgcagagagtgtgggcgaggctttcgtgctaaatcaactctcctcctacaccagtggacacattcagaggtgaaacctcacgtgtgtgaggagtgtgggcatggatttagccagaagtcgtcgctcaaatcacatcggagaacacactcaggggagaagccttatgtgtgtggggaatgtgggcggggatttagccggaggatagtcctcaatggacactggaggacacacacgggagagaagccttacacgtgctttgagtgtgggcgaaactttagcctcaagtccgctcttagtgtacatcagaggatacactctggggagaagccttatgcatgcacggagtgtgggcaaggctttatcacgaaatcacagctcatcagacaccagaggacacacacaggagaaaagccttatgtctgcggagagtgtgggcgaggctttatagctcagtcaaccctccactaccaccggagtacacactccaaggaaaaaccttatgtgtgcagccagtgtgggcgaggcttttgtgataaatcaactctcctcgcacacgagcagacacattcaggggagaagccttatgtgtgtggggaatgtgggcggggatttggccggaagatactcctcaacagacactggaggacacacacaggagagaaaccttacgcatgcatcgagtgtgggcgaaactttagccacaagtccactctcagcttacatcagaggatacactcgggggagaagccttatgcatgcgtggagtgtgggcaaagctttaggagaaagtcacagctcatcatacaccagaagatacactcggggaaaagctttagaggtgcaaggagtgaggatgtgattttagcaacaagtcagccatcagccacaccagcggaaatgcttagggagaagccttgtttgtaaggtaatgtggacagagctgtacgtggacatcattacttgtcacgtgtcagaggacacactcgggagaaaccttcatggagtgagagtaaggtgttggctggaagtggccccttaagagatacttggagtcaaatctatccactgtacgcccaccccactcttgttctaagagctttggggacagtcttttgaccccttacattcctttagatgtgaagatgacagagatctaacttctgagagcagaggtgtcaagtgacggtccccttggaggaatggtctttgcatctgactacttccttctgcaactgtgttcttccattagcttccatgacactctcctgctttatttttttctacatctctagcctttgctgtttcctctcctaccccacctttagattttactcagagttcagtctccagccctacaatctgagggacacctttaccaggtccccttcctaaccctccagtcccaaatccaagattctttaaccacactctaaaagttcttcagactcaggacttaaacatagccacgccaccttggccttcaatgacagggatctagcaatgctgcatcatcagccttccaataccaggtttaagggtattttaaacacagctcctcttaaatcctccaatctcagtacccagtgttttagccatgctcgggtggctaaattacatccaggaatggtgccagggcctttagccatttgtctctcctcacactccagggcccatatggcccaggttctgacagtttgccttactcccttgggctggggctagccctacctgataccctgtgtcaatgagtgtaccttggagagctatccactcaggccccagtgcctctatttgctaagggactctgccacagaaaagaaggggagagatgttcatgtaacctcaaaatacttaggcttggttttgatgctagagaggaaaaaggacttggagagagagaaggaatggctggtccagaggcttttgtccactccctctcactggaagtggttgatctccagggaatccccaaggttagcctgcttaggggaagggctaggggtacctggaatgtaggatctcccccatgcctggcctaccaccctaatgtgtctggaattggtgggttcttggtcttgctgacttcaagaatgaagccgtggaccctcacggtgagtgttacaattcttaaaaaaaaaaaaaaaaaaaaaaaaaaaaaaaaaaaaa

SEQ ID NO: 993 - DNA, 6210 bp, Homo sapiens
ggtgctagaagtcggaccggaagtggaagtggtccccgaaggctatttcgccgctggcgtcaggactattttcacgttttaatgccgagaggtctctgtgacgattttggttcttgggtgtctctggggagtccctgggccagaccttcctccagactccagcccacctcttcggagcagctctgctgagttcacagatgaccactaaacttcaggcaccctagacaaaaagggttgagatccagtgtggccatgccagctagttggacctcaccccagaaatcctcagccctggctccagaggatcatggcagctcctatgagggatcagtgtccttcagggatgtggctatcgatttcagcagagaggaatggcggcacctggacctttctcagagaaacctgtaccgggatgtgatgctggagacctacagccacctgctctcagtagggtatcaagttcctaaaccagaggtggtcatgttggagcaaggaaaggaaccatgggcactgcagggtgagaggccacgtcacagctgcccaggagagaaattatgggaccataatcaacatagaaaaatcatcggttataaaccagcttcctctcaagatcaaaaaatttattctggggaaaaatcctatgagtgtgctgaatttggaaagagcttcacctggaagtcacagttcaaggtacatctgaaagttcctacaggagaaaaactctatgtatgtattgaatgtgggagggcttttgtacagaagccagaattcatcacacatcagaaaacccatatgagagagaagccctataagtgcaatgaatgtggaaaatccttttttcaagtatcgtctcttttcaggcatcacagaattcataccggagaaaaactatatgaatgtagtgaatgtgggaaaggtttcccttataactcagatctcagtatacatgagaaaattcatactggagagagacaccatgaatgcactgactgtggcaaagcgttcacacaaaagtccacactcaagattcatcagaaaatccatacaggcgagagatcctacatctgtattgaatgcgggcaggccttcatccagaaaacacaattgattgcacaccgaagaattcatagtggagaaaaaccatatgaatgcaataactgtggcaaatccttcatttccaagtcacaacttcaggtacatcaacgtgttcacacaagagtgaagccctatatatgtaccgaatatgggaaggtcttcagcaataattccaacctcattacacatgagaagattcaaagtagagagaaatcttccatatgtactgagtgtgggaaggcctttacctacaggtcagagttgattattcatcagagaattcacactggagagaaaccttatgaatgcagtgactgtgggagagccttcactcagaagtcagcactcacagtgcatcagagaattcatacaggagaaaaatcgtatatatgcatgaaatgtggactggccttcatccggaaggcacacttgattacacatcaaataattcatactggagagaaaccttataaatgtggtcactgtgggaaattgtttacttccaagtcacaactccatgttcataaacgaattcacacaggagaaaagccctatgtatgcaataaatgtgggaaggcattcaccaaccggtcaaatctcattacacatcagaaaactcatacaggagagaaatcttatatatgttccaaatgtggaaaggccttcacccagaggtcagacttgattacacatcagagaatccatactggggagaagccttatgaatgcaatacttgtggaaaagcctttactcagaagtcaaatcttaatatacatcagaaaattcacactggagagagacagtatgaatgccacgaatgtgggaaagccttcaaccagaaatcaatactcattgttcatcagaaaattcatacaggagagaaaccctatgtatgcactgagtgtggaagagctttcatccgcaagtcaaactttattactcatcaaagaattcatactggagagaagccttatgaatgcagtgactgtgggaagtcctttacctccaagtctcagctcctggtgcatcagccagttcacacaggagagaaaccctatgtgtgtgccgagtgtgggaaagcctttagtggcaggtcaaatctcagtaagcaccagaaaactcataccggagaaaagccctacatttgttctgaatgtgggaagacctttcgacagaagtcagagttgattacacatcacagaattcatactggagagaaaccttatgagtgcagtgactgtgggaagtctttcactaaaaaatcacagctccaagtgcatcagcgaattcacactggagagaagccttacgtgtgtgctgagtgtgggaaggcctttagcaacaggtccaatttgaataaacatcagacaacacacactggagacaaaccctacaagtgtggcatctgtgggaaaggcttcgttcagaaatcagtgttcagtgttcatcagagcagccacgcttgagagaaacagtgtgagaaaacccccctgagggttgggtctgattgtacactgttgcacgcatgcagcagaaaaatatgtatattattgtaaatagaaatgaccacatcagaatgtcacacatggctgttctggagagggcctctgagaaggcactgaatgaggcgagggacccttcctacattgtcaccatccccagtaaaccttgggtcattattcatactgacaaggaaccgagtcaatttggtgaataggaaaagccttctcatgaaaactacaatagaatactgttaccaaattcttcataagaaagatcatattatgggaatgataatcctgtttactgtggattaggtatagtgccaacagtttgaatggtaagacaacataatatatatgatagtgatgaatccttctgtgagttgtttgttccagaacacactgtctagtagaattgtgggtattttcttcttttgaatcgaacacagttgtgcatatccaattccccattgagtatttctatcaagcaagagatactgcaataagacaaactccctgtgtattcagacacagacctcagagcgtatgttgagtccccattgtcatagaaaaagacttacagtccccttcattatctgccaggactctctctgagccccacaggttctcagcacattgtgtttgacacccagcacagtgttttttctttttctttctttctttctctttctttctttctttctttctttctttctttctttctttctttctttctttctttctttccttctttctttctttttctttctttctctttctttctttctttctttctttctttctttctttctttctttctttctttctttctttttttgagacagagtcttgctctgtcgggcaagctagagtgcagtggcgctatcttggctcactgcaacctccgtctcccgggctcaagcaattctcctgcctcagcctcctgagtagctgggattgcgtgtgccaccacgcccagctaatttttgtatgtttagtagaaacgggggtttcaccatgctggccaggctggtctcgaactcctgacctcatgatccgcccgcctcggcctcccaaagtcctgggattacggacgtgagccactgcgcccggcccagcacagtgttttgtacactcccaccaccctcaagaaagcctttgaggttaggattttcaggtcatctgggagaacttaaattcttccttctgctattacaattcttctcactcagttgcctgcctcttttttttttttaatttacttgtgactgagttgaagcccagcattttactttccttaatgatctgactttcataagttgataagtcatgaaatcattatcttacattatatgagatatgagataaatcataaatcatatgaaattgataactcatatgaaaaccaaccccaccatatgttcactgtctacttgtgtccatcttcgtcccacgcaccccacaaggaccttccccgccatgtgcctcaaacatcagttcctgactcagggcctttgtatttgcagtgcccgttgcaaagagcacaattctttattttatctgtggcttgtccgtcatgtctttttttccatgacacctccacacaggccttccctgcctgcctggtttaaaattccagccccttacccttcctcctttattcttctccctagcaatttccaccatgctgcctggtgtattttcctcatttctctgtggcttctacactagaaaatatttcccttttgttcaccactatgagtctagacccatgactgccatacagcaggcattccataaatgcacctgtggagagttgacccatgcttgttgcgtgacttctgtctgatttttttctgtgttgcagcataagaagcgctaatagggagaaccaacttggctaaaacacaccaggctttttcacctctagtctgtacctgggctgtatcccttctcaaccctaaagctaaaaagtcattgtgaaccttttggtctgatgctaaagaagggaaaacaggtacaggaaatcccatgtggatgcttgcttccaggatttcctgccatgattccagaatcccacagctccaacatgattgcaaaagactccctgctcatttttcctcagcatgcacagcgctgtcctgtctcagttgcaactcgacagagccgcatttactccagaacccaatccacacacctgctcatcctgccccgagaggagtgcctgaagccaatagcagggaactagagcagacttgggtggatcttcattggatattaggtatcttgccctagataggcagcagtggccttacagatgctgacagatgatctgattagatgcacagttgctgggtggcgtctggggccagtctattggcagttctgggagtgggaactatttgggctctgcaaagatggtttcacctttaagaagggcagtatggggaggtgaagatggggcccaaaggatagaacatagtcaaagaagcagggccacaatgcccctttaattcccaagccctagttgggcagtgcttggtgacacatcccattacctcaccttagatcaatgtctactgagccatcattagctctgcttcctcacttcttcacagtatctgatggcccatcacatgctgctcaacatcttagaccaatgtctgctcacccattacctcccttcacctcatccagcactgtatctgaagcttcactattcttccttcagttttggatattttgtgatacaacattatccccaacttaggacaatgtcagctgactctcaggagggtgcctggagatcacctcttccttcctaacataccctagaacaaggtctggtccccttcattattcccattttaccttactcctaagtgtatcactcctcatgaattccaggaaatatggaggaaaacacatttcactgtacatgactttcaataatttctcctttatatttattgtaacgtgatattttagtgctgacatatatatgtatatgtatgcccatttatataaaagactagtttttagagaaattttaggttcacagcaaaatggggcagaaggtacagagatttcccatatatcccctaccctcacatatacacagcctcccccatcatcaacatcccccttcagagtggtacatttgttacaattgatgaaactacattgacactatcggccaaagtccatggtttaattagggttcagtcttgatgtgcattctgtgggttgagacaaatgaataatgacatgtatgcattattacagaaggataaagagccgtttcactgtcccaataatcctctgtgtttcgcctactcctctaaactcctggctattttcttttgtctccataattttgcctctgaaccataaagtatgcagccttttcagattgatttgtttcacttagtaatgtggatttaagtttcttccatgtcttttcgtagcttgctagctcttttttttttttttttctcattgaataatatgctattgtctggaagtaccatgacttatttatccattcacctactgaaggacaccttaattgcttccaagttttgttgattatgaataaagatgctataaaca

SEQ ID NO: 994 - DNA, 2518 bp, Homo sapiens
tttgcttttgcttatttccgtccatttccctctctgcgcgcggaccttccttttccagatggtgagagccgcggggacacccgacgccggggcaggctgatccacgatcctgggtgtgcgtaacgccgcctggggctccgtgggcgagggacgtgtggggacaggtgcaccggaaactgccagactggagagttgaggcatcggaggcgcgagaacagcactactactgcggcgagacgagcgcggcgcatcccaaagcccggccaaatgcgctcgtccctgggaggggagggaggcgcgcctggagcggggacagtcttggtccgcgccctcctcccgggtctgtgccgggacccgggacccgggagccgtcgcaggtctcggtccaaggggccccttttctcggaagggcggcggccaagagcagggaaggtggatctcaggtagcgagtctgggcttcggggacggcggggaggggagccggacgggaggatgagctcccctggcaccgagagcgcgggaaagagcctgcagtaccgagtggaccacctgctgagcgccgtggagaatgagctgcaggcgggcagcgagaagggcgaccccacagagcgcgaactgcgcgtgggcctggaggagagcgagctgtggctgcgcttcaaggagctcaccaatgagatgatcgtgaccaagaacggcaggaggatgtttccggtgctgaaggtgaacgtgtctggcctggaccccaacgccatgtactccttcctgctggacttcgtggcggcggacaaccaccgctggaagtacgtgaacggggaatgggtgccggggggcaagccggagccgcaggcgcccagctgcgtctacatccaccccgactcgcccaacttcggggcccactggatgaaggctcccgtctccttcagcaaagtcaagctcaccaacaagctcaacggagggggccagatcatgctgaactccttgcataagtatgagcctcgaatccacatagtgagagttgggggtccacagcgcatgatcaccagccactgcttccctgagacccagttcatagcggtgactgcttatcagaacgaggagatcacagctcttaaaattaagtacaatccatttgcaaaagctttccttgatgcaaaggaaagaagtgatcacaaagagatgatggaggaacccggagacagccagcaacctgggtactcccaatgggggtggcttcttcctggaaccagcaccctgtgtccacctgcaaatcctcatcctcagtttggaggtgccctctccctcccctccacgcacagctgtgacaggtacccaaccctgaggagccaccggtcctcaccctaccccagcccctatgctcatcggaacaattctccaacctattctgacaactcacctgcatgtttatccatgctgcaatcccatgacaattggtccagccttggaatgcctgcccatcccagcatgctccccgtgagccacaatgccagcccacctaccagctccagtcagtaccccagcctgtggtctgtgagcaacggcgccgtcaccccgggctcccaggcagcagccgtgtccaacgggctgggggcccagttcttccggggctcccccgcgcactacacacccctcacccatccggtctcggcgccctcttcctcgggatccccactgtacgaaggggcggccgcggccacagacatcgtggacagccagtacgacgccgcagcccaaggccgcctcatagcctcatggacacctgtgtcgccaccttccatgtgaagcagcaaggcccaggtcccgaaagatgcagtgactttttgtcgtggcagccagtggtgactggattgacctactaggtacccagtggcagtctcaggttaagaaggaaatgcagcctcagtaacttccttttcaaagcagtggaggagcacacggcacctttccccagagccccagcatcccttgctcacacctgcagtagcggtgctgtcccaggtggcttacagatgaacccaactgtggagatgatgcagttggcccaacctcactgacggtgaaaaaatgtttgccagggtccagaaactttttttggtttatttctcatacagtgtattggcaactttggcacaccagaatttgtaaactccaccagtcctactttagtgagataaaaagcacactcttaatcttcttccttgttgctttcaagtagttagagttgagctgttaaggacagaataaaatcatagttgaggacagcaggttttagttgaattgaaaatttgactgctctgccccctagaatgtgtgtattttaagcatatgtagctaatctcttgtgttgttaaactataactgtttcatatttttcttttgacaaagtagccaaagacaatcagcagaaagcattttctgcaaaataaacgcaatatgcaaaatgtgattcgtccagttattagtgaagcccctccttttgtgagtatttactgtttattg

SEQ ID NO: 995 - DNA, 1886 bp, Homo sapiens
tttcccgctcagccctggagcgcgtagctctaccaagaatggccactgtgccagatgcccctgaccagcgttgcccatttgaatttcctagcaggccccccaaagtaggtatttcagtaccctgttagagctgaggcgcaggtaaaatgactggcccaggccggtcccaccccgtaaggatttgaacgttggctccacaactcgggagcctgcgcctttcctcctcccaacgtggactcctgcccggcgaagtgcctcacttccttctcccgggagtcatcaagctttggtgtatgtgttggccggttctgaagtcttgaagaagctctgctgaggaagaccaaagcagcactcgttgccaattagggaatggaccgtttgggtccctttagcaatgatccctctgataagccaccttgccgaggctgctcctcctacctcatggagccttatatcaagtgtgctgaatgtgggccacctccttttttcctctgcttgcagtgtttcactcgaggctttgagtacaagaaacatcaaagcgatcatacttatgaaataatgacttcagattttcctgtccttgatcccagctggactgctcaagaagaaatggcccttttagaagctgtgatggactgtggctttggaaattggcaggatgtagccaatcaaatgtgcaccaagaccaaggaggagtgtgagaagcactatatgaagcatttcatcaataaccctctgtttgcatctaccctgctgaacctgaaacaagcagaggaagcaaaaactgctgacacagccattccatttcactctacagatgaccctccccgacctacctttgactccttgctttctcgggacatggccgggtacatgccagctcgagcagatttcattgaggaatttgacaattatgcagaatgggacttgagagacattgattttgttgaagatgactcggacattttacatgctctgaagatggctgtggtagatatctatcattccaggttaaaggagagacaaagacgaaaaaaaattataagagaccatggattaatcaaccttagaaagtttcaattaatggaacggcggtatcccaaggaggtccaggacctgtatgaaacaatgaggcgatttgcaagaattgtggggccagtggaacatgacaaattcattgaaagccatgcattggaatttgaactccgaagggaaatcaagaggctccaagaatacaggacagcaggcattaccaatttttgtagtgccagaacctacgatcacctcaagaagacacgggaggaagagcgccttaaacgcactatgctctcagaagttctccagtatatccaggacagtagtgcttgccagcagtggctccgccggcaagctgacattgattccggcctgagtccttccattccaatggcttcgaattcaggtagacggagtgcaccacccttgaacctcactggcctccctggcacagagaagctgaatgaaaaagaaaaggagctctgtcagatggtgaggttggtccctggagcctatttagaatacaaatctgctctattgaacgaatgtaacaagcaaggaggcttaagactggcgcaggcaagagcactcatcaagatagatgtgaacaaaacccggaaaatctatgatttcctcatcagagaaggatacatcactaaaggctaaggctccaagagcttgggatcagaagtcagaagtttggaatgtggtgggtcaaaggacaatatgggtgggcattctggagagttgtttttcagctgaattctcatggtgaaaacaggggaaaggacaaaggaaaccttaaaaaaaaaaaaaaaaaaaaaaaaaaaaaaaaaaaaaaaaaaaaaaaa

SEQ ID NO: 996 - DNA, 2245 bp, Homo sapiens
gtacccccatcctttctctcgcccctcctacccgcagctcctggcgctcggcggggctaactgcagcgcggagatctcggccgccaagctccgcctcccgccccgggctgtgccccggggctcgcctgaggccgaccacccgcaccccacctctagcggctttgctcgaggcccaccttcttcccacccccggcaaactccagtaggctcgccctcgctgactccccgcccccgcgtcaactgcaaggggcccgcccatagccagttccggggcggttgctcacatcgaccggaactccccgccccctcccgcggcccctggggccgtaggaggccgcagcgaggaggtagagggggcgggggtcgcactagggtgtccctagagaacgaggactctgaaggcgggacatttgggcgacccccgggcggggccagccattaaacagtcccacttctgtgccagacactgaactgggctcttgacgggcatcatctcttaatcctcagaacatcccagggagctccacaggatccccatatcctgggccatgagtgagttgaaagactgccccttgcagttccacgacttcaagtctgtggatcacctgaaggtctgtccccgctacacggcagtgctggcacgctctgaggatgatggcatcggcatcgaggagctggacaccctgcagctggagctggagaccctgctgtcttctgccagccggcgcctgcgtgtgcttgaggccgaaacccagatcctcaccgactggcaggataagaaaggtgacagacgattcctgaagctgggtcgagaccatgaacttggagctccccccaaacatgggaagcccaagaagcagaaactggaagggaaggcaggacatgggccgggccctggcccaggacggcccaaatccaaaaaccttcagcccaagatccaggaatatgaattcactgatgaccctatcgacgtgccacggatccccaaaaatgatgcccccaacaggttctgggcttcagtggagccctactgtgctgacatcaccagcgaggaggtccgcacacttgaggagttactgaagcccccagaagatgaggctgagcattacaagatcccacccctggggaagcactactcccagcgctgggcccaggaggacctgctggaggagcagaaggatggggcccgggcagcggctgtggctgacaagaagaaaggcctcatggggccactgaccgaactggacactaaagatgtggatgccctgctgaagaagtctgaggcccagcatgaacagccggaagatggatgcccctttggtgccctgacgcagcgcctcctgcaggccctggtggaggaaaatattatttcccctatggaggattctcctattcctgacatgtctgggaaagaatcaggggctgacggggcaagcacctcccctcgcaatcagaacaagcccttcagtgtgccgcatactaagtccctggagagccgcatcaaggaggagctaattgcccagggccttttggagtctgaggaccgccccgcagaggactccgaggatgaggtccttgctgagcttcgcaaacggcaggctgagctgaaggcacttagtgcccacaaccgcaccaagaagcacgacctgctgaggctggcaaaggaggaggtgagccggcaggagctgaggcagcgggtgcgcatggctgacaacgaggtcatggacgcctttcgcaagatcatggctgcccggcagaagaagcggactcccaccaagaaagaaaaggaccaggcctggaagactctgaaggagcgtgagagcatcctgaagctgctggatgggtagccctcacccctgcctcaggctgattatctggcctaggggaggggaagggaggcccacttccttctttgggcacaggaaacattggcctgtggctgtccctcaaatggcggcagtctctagagggccgtggcccttcccctgaggtcttttggcctagctctgtacaaccaggacacaggaagccctgctgggctagcctgaggcctagtctctgcttggtccccgagatggggttggaggggacttcgtttctgggtcttcctcttcccctctttaccatcccccactccctaatcccctacccctgtctccccttcaaggacttctcccttgtggttttgtaaagtgcaaacttaagaataaagtgactgctgtggtttttcaaaaaaaaaaaaaaa

SEQ ID NO: 997 - DNA, 7709 bp, Homo sapiens
aagggagctcagtaagtcacttctgggcgactgttgttttatttccggtctatgggacccggctgcgatttgctgctgcggacagcagctaccatcactgctgccgccatcatgtcagacacggacagcgacgaagattccgctggaggcggcccattttctttagcgggtttccttttcggcaacatcaatggagccgggcagctggagggggaaagcgtcttggatgatgaatgtaagaagcacttggcaggcttgggggctttggggctgggcagcctgatcactgaactcacggcaaatgaagaattgaccgggactgacggtgccttggtaaatgatgaagggtgggttaggagtacagaagatgctgtggactattcagacatcaatgaggtggcagaagatgaaagccgaagataccagcagacgatggggagcttgcagcccctttgccactcagattatgatgaagatgactatgatgctgattgtgaagacattgattgcaagttgatgcctcctccacctccacccccgggaccaatgaagaaggataaggaccaggattctattactggtgtgtctgaaaatggagaaggcatcatcttgccctccatcattgccccttcctctttggcctcagagaaagtggacttcagtagttcctctgactcagaatctgagatgggacctcaggaagcaacacaggcagaatctgaagatggaaagctgacccttccattggctgggattatgcagcatgatgccaccaagctgttgccaagtgtcacagaactttttccagaatttcgacctggaaaggtgttacgttttctacgtctttttggaccagggaagaatgtcccatctgtttggcggagtgctcggagaaagaggaagaagaagcaccgtgagctgatacaggaagagcagatccaggaggtggagtgctcagtagaatcagaagtcagccagaagtctttgtggaactacgactacgctccaccaccacctccagagcagtgtctctctgatgatgaaatcacgatgatggctcctgtggagtccaaattttcccaatcaactggagatatagataaagtgacagataccaaaccaagagtggctgagtggcgttatgggcctgcccgactgtggtatgatatgctgggtgtccctgaagatggcagtgggtttgactatggcttcaaactgagaaagacagaacatgaacctgtgataaaatctagaatgatagaggaatttaggaaacttgaggaaaacaatggcactgatcttctggctgatgaaaacttcctgatggtgacacagctgcattgggaggatgatatcatctgggatggggaggatgtcaaacacaaagggacaaaacctcagcgtgcaagcctggcaggctggcttccttctagcatgactaggaatgcgatggcttacaatgttcagcaaggttttgcagccactcttgatgatgacaaaccttggtactccatttttcccattgacaatgaggatctggtatatggacgctgggaggacaatatcatttgggatgctcaggccatgccccggctgttggaacctcctgttttgacacttgatcccaatgatgagaacctcattttggaaattcctgatgagaaggaagaggccacctctaactccccctccaaggagagtaagaaggaatcatctctgaagaagagtcgaattctcttagggaaaacaggagtcatcaaggaggaaccacagcagaacatgtctcagccagaagtgaaagatccatggaatctctccaatgatgagtattattatcccaagcaacagggtcttcgaggcacctttggagggaatattatccagcattcaattcctgctgtggaattacggcagcccttctttcccacccacatggggcccatcaaactccggcagttccatcgcccacctctgaaaaagtactcatttggtgcactttctcagccaggtccccactcagtccaacctttgctaaagcacatcaaaaaaaaggccaagatgagagaacaagagaggcaagcttcaggtggtggagagatgttttttatgcgcacacctcaggacctcacaggcaaagatggtgatcttattcttgcagaatatagtgaggaaaatggacccttaatgatgcaggttggcatggcaaccaagataaagaactattataaacggaaacctggaaaagatcctggagcaccagattgtaaatatggggaaactgtttactgccatacatctcctttcctgggttctctccatcctggccaattgctgcaagcatttgagaacaacctttttcgtgctccaatttatcttcataagatgccagaaactgatttcttgatcattcggacaagacagggttactatattcgggaattagtggatatttttgtggttggccagcagtgtcccttgtttgaagttcctgggcctaactccaaaagggccaatacgcatattcgagactttctacaggtttttatttaccgccttttctggaaaagtaaagatcggccacggaggatacgaatggaagatataaaaaaagcctttccttcccattcagaaagcagcatccggaagaggctaaagctctgcgctgacttcaaacgcacagggatggactcaaactggtgggtgcttaagtctgattttcgtttaccaacggaagaagagatcagagctatggtgtcaccagagcagtgctgtgcttattatagcatgatagctgcagagcaacgactgaaggatgctggctatggtgagaaatccttttttgctccagaagaagaaaatgaggaagatttccagatgaagattgatgatgaagttcgcactgccccttggaacaccacaagggccttcattgctgccatgaagggcaagtgtctgctagaggtgactggggtggcagatcccacggggtgtggtgaaggattctcctatgtgaagattccaaacaaaccaacacagcagaaggatgataaagaaccgcagccagtgaagaagacagtgacaggaacagatgcagaccttcgtcgcctttccctgaaaaatgccaagcaacttctacgtaaatttggtgtgcctgaggaagagattaaaaagttgtcccgctgggaagtgattgatgtggtgcgcacaatgtcaacagaacaggctcgttctggagaggggcccatgagtaaatttgcccgtggatcaaggttttctgtggctgagcatcaagagcgttacaaagaggaatgtcagcgcatctttgacctacagaacaaggttctgtcatcaactgaagtcttatcaactgacacagacagcagctcagctgaagatagtgactttgaagaaatgggaaagaacattgagaacatgttgcagaacaagaaaaccagctctcagctttcacgtgaacgggaggaacaggagcggaaggaactacagcgaatgctactggcagcaggctcagcagcatccggaaacaatcacagagatgatgacacagcttccgtgactagccttaactcttctgccactggacgctgtctcaagatttatcgcacgtttcgagatgaagaggggaaagagtatgttcgctgtgagacagtccgaaaaccagctgtcattgatgcctatgtgcgcatacggactacaaaagatgaggaattcattcgaaaatttgccctttttgatgaacaacatcgggaagagatgcgaaaagaacggcggaggattcaagagcaactgaggcggcttaagaggaaccaggaaaaggagaagcttaagggtcctcctgagaagaagcccaagaaaatgaaggagcgtcctgacctaaaactgaaatgtggggcatgtggtgccattggacacatgaggactaacaaattctgccccctctattatcaaacaaatgcgccaccttccaaccctgttgccatgacagaagaacaggaggaggagttggaaaagacagtcattcataatgataatgaagaacttatcaaggttgaagggaccaaaattgtcttggggaaacagctaattgagagtgcggatgaggttcgcagaaaatctctggttctcaagtttcctaaacagcagcttcctccaaagaagaaacggcgagttggaaccactgttcactgtgactatttgaatagacctcataagtccatccaccggcgccgcacagaccctatggtgacgctgtcgtccatcttggagtctatcatcaatgacatgagagatcttccaaatacataccctttccacactccagtcaatgcaaaggttgtaaaggactactacaaaatcatcactcggccaatggacctacaaacactccgcgaaaacgtgcgtaaacgcctctacccatctcgggaagagttcagagagcatctggagctaattgtgaaaaatagtgcaacctacaatgggccaaaacactcattgactcagatctctcaatccatgctggatctctgtgatgaaaaactcaaagagaaagaagacaaattagctcgcttagagaaagctatcaaccccttgctggatgatgatgaccaagtggcgttttctttcattctggacaacattgtcacccagaaaatgatggcagttccagattcttggccatttcatcacccagttaataagaaatttgttccagattattacaaagtgattgtcaatccaatggatttagagaccatacgtaagaacatctccaagcacaagtatcagagtcgggagagctttctggatgatgtaaaccttattctggccaacagtgttaagtataatggacctgagagtcagtatactaagactgcccaggagattgtgaacgtctgttaccagacattgactgagtatgatgaacatttgactcaacttgagaaggatatttgtactgctaaagaagcagctttggaggaagcagaattagaaagcctggacccaatgaccccagggccctacacgcctcagcctcctgatttgtatgataccaacacatccctcagtatgtctcgagatgcctctgtatttcaagatgagagcaatatgtctgtcttggatattcccagtgccactccagaaaagcaggtaacacaggaaggtgaagatggagatggtgatcttgcagatgaagaggaaggaactgtacaacagcctcaagccagtgtcctgtatgaggatttgcttatgtctgaaggagaagatgatgaggaagatgctgggagtgatgaagaaggagacaatcctttctctgctatccagctgagtgaaagtggaagtgactctgatgtgggatctggtggaataagacccaaacaaccccgcatgcttcaggagaacacaaggatggacatggaaaatgaagaaagcatgatgtcctatgagggagacggtggggaggcttcccatggtttggaggatagcaacatcagttatgggagctatgaggagcctgatcccaagtcgaacacccaagacacaagcttcagcagcatcggtgggtatgaggtatcagaggaggaagaagatgaggaggaggaagagcagcgctctgggccgagcgtactaagccaggtccacctgtcagaggacgaggaggacagtgaggatttccactccattgctggggacagtgacttggactctgatgaatgaggcttcctttgggcctccttggtcagccttccctgttctccagcctaggtggttcacctttccccaatttgttcatatttgtacagtatctgatcctgaaatcatgaaattaactaacaccttagcctttttaaaagtagtaagtaaatgataataaatcacctctcctaatcttcctggggcaatgtcaccctttgatttaaaacaaagcaaccccctttcccctaccactacggaaaagagcaagctcatttttccgtgtcctcctttatttaactccatttattgcttttggtataatttttccctggggaaggaggggaaattatgaaagaactagtaactttatgtcctcttgatgtattaggaaatttccggccaggcgtggtggctcacacctgtaatctcagcactctgggaggccgaggcgggcagatcacctgaggtcagaagttcgagaccagcttggccaacatggcgaaaccgcatctctactaaaaatacaaaaattagccaggtgtggtggcgtatgcctgttaatcctagctactcgggaggctgaggcaggagaattacttgaacccgggaggcagaggttgcagtgagtggaggtcacgccactgcactccagcctgggcgaaagagtgagattcagtctcaaaaaaaaaaaaatttccaagcatggtatcatctcacttttctaatttacaggctggagcagatgagagccctcctgctgggacagagaattgggttctagtggactctgtgctacacttaaacctgtgagacaaaccgcccattattttattatttaattatgcaatgcctagttcctaaatggattggaggcaaattaccgtaaattttgaaacagcctatatgtcagaaatgataatgttgccacctaaatgttttctgtcccccccaccctccccaggggaaatggtaggaaaatggtaagtttcttagggcaaagactgtgtcttctgtttcttttcatgcttaggatatggttctgtgcatagtaggtactcagtaaatgttcctagaatcataaaatcctcaacagatatgttactgagcatctgcttttcatgataagcactctatcagatccttgggatgcaaaggtaaataagacaaatcccttttacccaaagagctcaccatcaagttgggggagggaaagtggaattcaaaacatgttaataaatcatcatagtactgtgagataagtgcaattaagaagctagttataaagtataggggaaatagaggagtaatcatgtctgaaaagtcaggaaagtcttcctagaggtaatttttaagctgattgttttagaattagtagaagcttgccagatggaaaagtccaggcaaagtgtaacatgaatgggaaaggccacagtctagaaatggcagagtgtgttcctagtttgtttgtttgtttgtttgtacctgccttgttccaggaaggatttaatgtggtttatattccagtcctttaatgctggaagggctgagatgagactgaaagatgggcaggaagtatatcatcacaagctttgtgtttgatgttaatgtgtatgatttttatattatgggaaataagctcttagaggagtgatataatcaggtttgtgttttagaaatctgtgtaatgaatgaatgaagaaagaaattgaagaatcatgtaacatatgtgatcgcatttttgtaaaagaaccatgtgtgtttatatgtgtttatatatatacttgtgtatgcaaaggtaaaagtctgaaaggatatatgctaactgttcacaatgataaccccccaggaatgggattggaggggagggggcttctgtgtttgttatgtatgctgggtgggatattgtgcttttatttctatattgtttgaatttttttacagtatgtattatttttgtaataaaaattttaaaaaattccaaaaaaaaaaaaaaaaaa

SEQ ID NO: 998 - DNA, 762 bp, Homo sapiens
gttcgccgcctctcccaccggcccgatgagctgcagcggctccggcgcggaccccgaggcggcgccggcctccgccgcctcggccccgggccccgcgcccccggtctcggctcccgccgcgctgccctccagcaccgccgcggagaacaaggccagccccgcggggacagcggggggacctggggctggagcagctgctgggggcacgggacccttggcggcgcgggccggggagccagctgagcggcgtggggcggctccggtgtcggcgggtggcgcggcgcccccggagggggccatatctaacggggtttacgtactgccgagcgcggccaacggagacgtgaagcccgtggtgtccagcacgcctttggtggacttcttgatgcagctggaagattacacgcctacgatcccagatgcagtgactggttactacctgaaccgtgctggctttgaggcctcagacccacgcataattcggctcatctccttagctgcccagaaattcatctcagatattgccaatgatgccctacagcactgcaaaatgaagggcacggcctccggcagctcccggagcaagagcaaggaccgcaagtacactctaaccatggaggacttgacccctgccctcagcgagtatggcatcaatgtgaagaagccgcactacttcacctgagccacccaacctaaatgtacttatctgtccccatgtccccacaccagcctgttttcataataaactttattgtgacaggc

SEQ ID NO: 999 - DNA, 1599 bp, Homo sapiens
aagatcctggcctgtgcagctcgggtttccgagcttctgcctcaggcatctccgcgatctcctctcccctccaatcctatccgtgatggacgatgcccacgagtcgccctccgacaaaggtggagagacaggggagtcggatgagacggccgctgtgcccggggacccgggggctaccgacaccgatggaatcccagaggaaactgacggagacgcagatgtggacttgaaagaagctgcagcggaggaaggcgagctcgagagtcaggatgtctcagatttaacaacagttgaaagggaagactcatcattacttaatcctgcagccaaaaaactgaaaatagataccaaagaaaagaaagagaaaaagcagaaagtagatgaagatgagattcagaagatgcaaatcctggtttcttctttttctgaggagcagctgaaccgttatgaaatgtatcgccgctcagctttccctaaggcagccatcaaaaggctgatccagtccatcactggcacctctgtgtctcagaatgttgttattgctatgtctggtatttccaaggttttcgtcggggaggtggtagaagaagcactggatgtgtgtgagaagtggggagaaatgccaccactacaacccaaacatatgagggaagccgttagaaggttaaagtcaaaaggacagatccctaactcgaagcacaaaaaaatcatcttcttctagaccaaagtctagaaaggcctatgttactgacggaagaagtattggttccagacttcctataagactgtctgcattggtgctttagtatctcaggcctccaaggattccatgatgattttaatgtctttctcaaaactctgatatttgtcacacctagaaagtatgtagcctgattgatacttgccttgactaaattttgggacctcttggggcattttgaagtatttaactgtcttgaccagttggaagaagatacgtgggccataagcatcttctggacaggggaactgctttcagagagaaaacctttccaagagagttttgttttgttttggtttcgttttgtttgagatagggtcttgctctatcacctaggctggagtgcagcggcatgactgcagccttgaactcctgggcttaagtgaccctcccacctcagtctcctgagtagctaggactacaggcacacactactgtgcccagctaacttatttttattttttatggagatggggtcttgctttgttgcccaggctggtcgtgaactcctggcttcaagcagtcctcctgcctcagcctcctaaagtgccgagggctttaatggtttcacattgaagcctgaagttgctaagacttaggttgtttcttatatctggttttaagtagatgaaacaaccagaaacttttacttgtgatactctaccatgaaggatgcggtaatggcaggaatagcagaataattggtgcttgtaaacatttaagattctcctgtggattttggtgagtgatcattaaactgttttccaacttgcaaaaaaaaaaaaaaaaaaaaaaaaaaaaaaaaaaaaaaaaaaaaaaaaaaaaaaaaaaaaaaaaaa

SEQ ID NO: 1000 - DNA, 1129 bp, Homo sapiens
cggaagtagtcggggagggccgcgcagtcggaccggctgctgagacgaacgcttcactggggcagtctctgcatatcatggggagatagacgctgctgcctttaattggccttggtcctcacagctccaaaaagaaacaggatctcgataagctctatgagctgaagtccaaagctcggcagattatgaaccagtttggcccctcagccctaatcaacctctccaatttctcatccataaaaccggaaccagccagcacccctccacaaggctccatggccaatagtactgcagtggtaaagataccaggcactcctggggcaggaggtcgtcttagccctgaaaacaatcaggtattgaccaagaagaaattacaggacttagtaagagaagtggatcctaatgagcagttggatgaagatgtggaggagatgctgctgcagattgctgatgattttatcgagagtgtggtgacagcagcctgtcagcttgcgcggcatcgcaagtctagcaccctggaggtgaaagatgtccagctgcatttagagcgccagtggaacatgtggatcccaggatttggctctgaagaaatccgaccctacaaaaaagcttgcaccacagaagctcacaaacagagaatggcattgatccggaaaacaaccaagaaataacacacggaaaggtcagggaatggacagcaatgtatttggagatacttgagctgagaactcagccatctcatccttggatttttttttttaatgctttacagagaagcatatattttttattaacagtgcagcaatatctataatgactgagaggatctgccaaaagaataaagcctcctaccccaacttccggtcccttttccctgccatctcaaagaggagcaatgtatcttccagagaagattttatttgtggtttattatataagtgactgaatatgggacaaagcattatggtctttttgggtaagacagtattagcaggatttgtaaagggttttgtttccttctcccttccccttttccctgtactttgtaatgtcagtgtttatatgaatatgactttcatttgcttttccagaataaagaagttattaatcgaaaaaaaaaaaaaaaaaa

SEQ ID NO: 1001 - DNA, 577 bp, Homo sapiens
gtgtaaccagctgggagccagccggcaggacgctgtgagttggcgtgctagtgggatggcagatgaggaagaagaccccacgtttgaggaagaaaatgaagaaattggaggaggtgcagaaggtggacagggtaaaagaaagagacttttttctaaagaattgcgatgtatgatgtatggctttggggatgaccagaatccttatactgagtcagtggatattcttgaagatcttgtcatagagtttatcactgaaatgactcacaaggcaatgtcaattggaagacaaggtcgagtacaagttgaagatatcgtcttcttgattcgaaaggacccaaggaagtttgccagggttaaagacttgcttactatgaatgaagaattgaaacgagctagaaaagcatttgatgaagcaaattatggatcttgacactttttgtagtttccgaaaattaccatctggggaaaccatatataataattgtatattttctaaagtaagattctgatatctagccatgtaaatgaaagatggagaaacacaaagttttcagcctttatttttatgcctttgatt

SEQ ID NO: 1002 - DNA, 2166 bp, Homo sapiens
agtacagctccggccgccgcgccgcctggctttcgtattcgttgttctcggcgggctgtggggcctccgcgccgcggccgttagtcatgtcggattctggaagttacggtcagtctgggggtgagcagcaaagttattctacctatggaaatccaggcagccaaggctatggacaagcatcacaaagctattctggctatgggcaaacgactgattcctcttatggacagaactacagcggttactccagttatggacaaagttattcacagtcctatggtggttatgagaatcaaaagcagagctcatatagccagcaaccatataataaccagggacagcagcaaaacatggaatcatcaggaagccaaggtggaagagcaccttcctatgaccagccagactatggtcaacaagattcatatgaccagcagtcaggctatgatcaacatcaaggctcatatgatgagcagtcaaattatgatcagcagcatgattcctatagtcaaaaccagcagtcctatcattcacaaagggaaaactacagccaccacacacaagatgaccgtcgtgatgtgagtaggtatggagaagataatagaggatatggcgggtcacagggaggaggtagagggcgtgggggatatgacaaggatggaagaggtcctatgacaggatcaagtggtggtgaccgcggtggcttcaaaaattttggtggtcacagggattatggacccagaacagatgctgattcagaatctgataattcagataacaacacaatctttgtgcaaggacttggggagggtgtgtctacagatcaagttggggagttctttaaacaaataggaattatcaagacaaataagaagaccggaaaaccaatgataaatctttatacagacaaggacacaggaaagccaaagggggaggcaacagtgtcatttgatgaccctccttcagctaaggcagccattgactggtttgatggaaaagaattccatggcaacatcattaaagtgtcctttgccactagaagacctgaattcatgagaggaggtggaagtggaggtgggcggcgaggccgtggaggatatagaggtcgtggaggctttcaagggagaggtggagaccccaaaagtggggattgggtttgccctaatccgtcatgcggaaatatgaactttgctcgaaggaattcctgcaatcagtgcaatgagcctagaccagaggactctcgtccctcaggaggagatttccgggggagaggctacggtggagagaggggctacagaggtcgtgggggcagaggtggagaccgaggcggctatggtggagacagaagtgggggtggctatggtggagacagaagcagcggtggtggctacagcggagatagaagtgggggcggctatggtggagacagaagtgggggtggctatggtggggacagaggcggcggctatggtggggacagaggaggcggctatggaggagaccgaggaggtggctatggaggagatcgaggtggctatggaggagaccgaggtggaggctatggtggagaccgaggaggctatggaggagatcgaggaggttacggaggagatcgaggaggttatggaggagatcgaggaggctatggaggagacagaagccgggggggctatggaggagaccgtggtggtggcagtggctacggtggagaccgaagtggaggctatggaggagacaggagtggtggcggctatggaggagaccgaggtgggggctacggaggagaccgaggtggctatggaggcaaaatgggaggaagaaacgactacagaaatgatcagcgcaaccgaccatactgatgactgttttgaatgttcctttgtctctgacatgatccatagtgaaattgccagagttttgcctgctgctttcctcgtggcctcttcttgggtagtgaaattaagtgacatttggatttttatttgggtgggagggctgggacagtttttcttctagaaatgtctgttgagatttccccctttagtttccaaccttctccccaacccttggagctaaatgcgttgtaaaatattgccaaaatgaaaagtgttttgtaatactgcaataaaggctgcttgtttttgtggaaaaaaaaaaaaaaaaaaaaaa

SEQ ID NO: 1003 - DNA, 1893 bp, Homo sapiens
gccaacgatacgcctgctgcagcaggaggagttacgagccgggccgcgcgctgcctaaatacctaaaccaggtttagcgcctgctcatataaagctctcctaactcgtcttccggtgggaatttcttcacgtgggccggagtcggagactgagtttagctttactgaggagctctaaatttaggcgggtatgagtgatttcagtgaagaattaaaagggcctgtgacagatgatgaagaagtggaaacatctgtgctcagtggtgcaggaatgcattttccttggcttcaaacatacgtagaaactgtggccattggagggaaaaggaggaaggattttgctcagacaacaagtgcttgtttaagttttatccaagaagctctgctgaagcaccaatggcagcaagctgcagaatacatgtacagttattttcagaccttggaagattcagatagctacaaaaggcaggctgcacctgagattatttggaagctcggaagtgaaattctattttatcatcccaaaagcaacatggagagtttcaatacttttgctaaccggatgaaaaatattggcgtcatgaattatttaaagatctccttacaacatgcattataccttctgcatcatggaatgcttaaagatgctaagagaaatctgagtgaggcagagacatggagacatggtgaaaatacgtcttcccgggaaatattaatcaaccttattcaggcctataaagggcttttacagtattatacctggtctgaaaagaagatggaattgtcaaagcttgataaggatgattatgcttacaatgcagtagcccaggatgtgttcaaccacagctggaagacatctgcaaatatttctgcattgattaaaattcctggagtttgggacccttttgtgaagagttatgtagaaatgctggaattctatggggatcgagatggagcccaagaggtactcaccaattatgcatatgatgaaaagtttccatcaaatccaaatgcccatatctacttatacaactttctaaagagacagaaggcaccaagatcaaaattgataagtgtgcttaagattttgtatcagattgtaccatctcataaattgatgttggaattccatacattacttagaaaatcagaaaaagaagaacaccgtaaactggggttggaggtattatttggagtcttagattttgccggatgcactaagaatataactgcttggaaatacttggcaaaatatctgaaaaatatcttaatgggaaaccaccttgcgtgggttcaagaagagtggaactccaggaaaaactggtggccaggctttcatttcagctacttttgggcaaaaagtgattggaaggaagatacagctttggcctgtgagaaagcttttgtggctggtttactgttaggaaaaggttgtagatatttccggtatattttaaagcaagatcaccaaatcttagggaagaaaattaagcggatgaagagatctgtgaaaaaatacagtattgtaaatccaagactctgatactgaattttagttatttcacagttgtagctacacagtaagtagcttggtagatagttattgaatgtatttatgtagtgtattaagaagcttatattactacaaaaaacttatttttatatatttttatatttttgtattatttatagctagagaaacaatattactgcctttgctctttgtaactatgtctgttttcttttttgtaatgttaaatgttacatttgttaaggaataattcttcaaatgacaaactaattacagaatatagctctacagcagttattgtttgcaaatactttgcctcttgctattgtgtaataaactgtaacttgtaaaaaaaaaaaaaaa

SEQ ID NO: 1004 - DNA, 1703 bp, Homo sapiens
attcccgcgtttccggccggaacggttctccagcctttcccggaagctgcgctcgctacccgggtaacggtcccggctgtggaagctcccgcggcgccgcgattggacctcgaggagtcggaagagtttaaagaacgctgtactcagtgtgctgctgtctcatggggtcttactgatgaaggcaaatattattgcacttcttgccacaatgttacagagagatatcaggaagttacaaacactgatcttattcctaatacccaaataaaagccctcaaccgggggcttaaaaaaaaaaacaatactgaaaaaggctgggattggtatgtgtgtgaaggtttccagtatattctttatcaacaagcagaagccttaaagaaccttggagtaggcccagagttaaagaacgatgttttacataatttttggaagcgctaccttcagaagagcaagcaggcatattgtaagaacccagtttataccactggaaggaaacctacggtattagaagataatctaagtcattcagactgggctagtgagcctgagctgctaagtgatgtcagctgtcctccttttcttgaaagtggagcggagtctcagtctgacatccacactcgaaaacctttccccgtcagcaaagcatcacaatcagaaacgtctgtctgctctggatctctggatggagttgaatactcacaacgaaaggagaagggaatcgtgaagatgaccatgccacagacacttgccttctgttatctgtccttactttggcagagagaagcaataacactttcagatcttttgaggtttgttgaagaggaccatattccttacataaatgcttttcagcattttccagaacagatgaaattatatggacgtgacagaggaatctttggtatagagtcttggcctgactacgaggacatctataaaaaaacaatagaagttggaacatttttagatttgcctcgttttccagacataactgaagactgctatcttcatcccaacatactgtgtatgaaatacttgatggaagtcaacctccctgatgaaatgcatagcttaacttgccacgtggtaaaaatgactggaatgggagaagtggattttctgacatttgatcctatagccaaaatggcaaaagctgttaagtacgatgtacaagctgtagctatcattgtggtggtattgaaactgctctttctaatggatgacagtttcgagtggtctttgtctaatcttgctgaaaagcataatgaaaagaacaaaaaagataagccatggtttgatttcagaaagtggtaccaaattatgaagaaagcttttgatgagaaaaaacaaaaatgggaagaagcaagggccaagtacctgtggaaaagtgaaaagccactctactactcatttgtcgacaaaccagtagcatataaaaaaagagaaatggtggtgaatctacagaaacaatttagcacactggtcgattcaacagcaactgctggaaaaaaaagcccttcaagttttcagttcaactggactgaagaggacactgatagaacgtgtttccatggacacagccttcagggagtcctgaaagagaaaggccaatcactgctgactaagaattcattatattggcttagtacacagaaattctgcagatggtaataatgcttttagaaaaagtcacatataattga

SEQ ID NO: 1005 - DNA, 3925 bp, Homo sapiens
gtccaaaccggaagaccgtgggtagctgcggcggggctgacccgtcccgagtgccaaagctggggttctacttgagatttccctcgtggtgccagggtccggcgagcatcacgccgaggcccattttccagacgaccacgacgaggccggggtcacgaactctggcgccccttaccagcttccagtctctcgaggtggccagtgtggtgcttggtccttgtttccaggatggacttccccagctccctccgccctgcattgtttctgaccggcccccttggtctgagcgacgtccctgacctctctttcatgtgcagctggcgagacgcactgactctgccagaggcccagccccagaactcagagaatggggcactgcatgtgaccaaggacctgctgtgggagccggcaacccctgggcctctccccatgctgcctcccctcatcgatccctgggaccctggcctgactgcccgggacctgcttttccgcggagggtgccggtatcggaagcggccccgagtcgtgctggatgtgactgagcagatcagccggttcctcttggatcatggagacgtagcctttgcgcccctggggaagctgatgctggagaatttcaagctggagggagcggggagccgcactaagaagaagacagtggtcagtgtgaagaagctgctccaggacctcggtggacaccagccctgggggtgtccctgggcttacctcagcaaccgacagcgccgcttctctatcctcgggggccccatcctgggcacgtcggtggcgagccacttggcagagctgctgcacgaggagctggtgctgcggtgggagcagctgcttctggatgaggcctgcactgggggcgcgctggcctgggttcctggaaggacaccccagttcgggcagctggtctaccctgctggaggcgcccaggacaggctgcatttccaagaggtcgttctgaccccaggtgacaatccccaattccttgggaaacctggacgcatccagctccagggacctgtccggcaagtggtgacatgcaccgtccagggagaaagtaaggcccttatatacactttcctccctcactggctgacctgctacctgacccctggccctttccatccctcctcagctctgctggccgtccgctctgactaccactgtgccgtgtggaagtttggtaaacagtggcagccaacccttctgcaggcaatgcaggtggagaaaggggccacggggatcagcctcagccctcacctgcccggggagctggccatctgcagccgctcgggagccgtctgcctgtggagccctgaggatgggctgcggcaaatctacagggaccctgagaccctcgtgttccgggactcctcttcgtggcgttgggcagacttcactgcgcaccctcgggtgctgaccgtgggtgaccgcaccggagtgaagatgctggacactcagggcccgccgggctgtggtctgttgctttttcgtttgggggcagaggcttcgtgccagaaaggggaacgtgtcctgcttacccagtacctggggcactccagccccaaatgcctcccccctactcttcatctcgtctgtacccagttctctctctacctagtggacgagcgccttcccctggtgccgatgctgaagtggaaccatggcctcccctccccgctcctgctggcccgactgctgcctccgccccggcccagctgcgtgcagcccctgctcctcggaggccagggtgggcagctgcagctgctgcacctggcaggagaaggggcgtcggtgccccgcctggcaggccccccccagtctcttccttccaggatcgactccctccctgcatttcctctgctggagcctaagatccagtggcggctgcaggagcgcctgaaagcaccgaccataggtctggctgccgtcgtcccgcccttgccctcagcgcccacaccaggcctggtgctcttccagctctcggcggcgggagatgtcttctaccagcagctccgcccccaggtggactccagcctccgcagagatgctgggcctcctggcgacacccaacctgactgccatgcccccacagcttcctggacctcccaggacactgccggctgcagccagtggctgaaggccctgctaaaagtgcccctggctcctcctgtgtggacagcacccaccttcacccaccgccagatgctgggcagcacagagctgcggagggaggaagaggaagggcagcggctgggtgtgctccgcaaggccatggcccgagggcagctcctgctgcagagagacctgggctccctccctgcggcagagccaccccctgcacccgagtcaggcctagaggacaagctcagtgagcgcctgggggaagcctgggcaggccgaggggctgcctggtgggagaggcagcagggcaggacctcggagcccgggagacagaccaggcggcccaagcgccggacccagctgtccagcagcttttcgctcagtggccatgtggatccctcagaggacaccagctcccctcatagccctgagtggccacctgctgatgctctgcccctgccccccacgaccccgccctcccaggagttgactccggatgcatgcgcccagggcgtcccatcagagcagcggcagatgctccgtgactacatggccaagctaccaccccagagggacaccccaggctgtgccaccacacctccccactcccaggcctccagcgtccgggccactcgctcccagcagcacacacccgtcctctctagctctcagcccctccggaagaagcctcgaatgggcttctgaggacacaaggtgggctgccctcaagccccagagagcccctcatccttcctctgggaccagatgtgccttccacagttgaaacttgagaagcagagctcgccaccttctggaggccactgtgatgatgagccaagcaatttggagccaagttgaagggacagggcaacaaaatacagtagtagtttcttttgtattttgtatattcgcctgaagatcatcccgcaaggcaggctggaggtgccggtgggcctgtgttgctgggattttagtctgtgctgggaggcagggctccgctgcgcctcagctgtgggggcctcaggcaggtccctcagttctcacgccttcctgtccagtggaatgggggccaggagtgctggctcctcgtgtttggtgagggtggagtgaggcccctgcagagctgctgatgaggtgggcacagcggccgttggcagctgctgttgtgggttgctttgtcaatctctgccccggtctgatgtttcctacagggagatgccttggatccaggttcagggactaaatacacttggcagctgaagatgaattggaatggtcacgttttttaggctggacagcgtcccgccacagctactacctgacactgagctcatgcagagagatgatggctgatgttccttctcccttgggacatgggtctggcacctgtgggctgtcgatagtgccctctgagcagagggtcacggtcatgtcagtttgggggaattctctgttgtgcctcacagactcccccctttctttcctccctccccttctcattttgatgtctaaagcatcaagtccctcttcctcggagtttctctagctgcagtggaagattctgttttcctgtggggaaaatgctcacttgagattttgcagggacccgggtctgtctggtttctgatgacatagtaagagaaaggtcttttttcaggttggctggtgaaaggaattgcatgtgactcacacaaacaggagctagcccaatcatacactgactcgcgtgggtgttaaaatgtttatcatgcctaagggagacatttatgattaaaccatttatgctacataa

SEQ ID NO: 1006 - DNA, 5049 bp, Homo sapiens
acagacaagatgtcggcggatggtagcttcgagcccttgcggagaggagcatctctgtgacagaagcttgtcgacggcggcttctaggagctagtcgaaggagcgaggttgaggcgggcagcgacccgtcaggtcgctcacctgggcaccggccagctgcgagacgtgacttggggaccgcaggggagtggagagtgtgaggtgccaaagactagtaatgccccgtatccccctaggaagccgggaagccaagctccgcgggaccgcttcatgccgctgactggtgtagagcccgccagaatgaacaggaagaaaggagacaagggctttgaaagcccaaggccatataaattaacccatcaggtcgtctgcatcaacaacataaatttccagagaaaatctgttgtgggatttgtggaactgactatatttcccacagttgcaaacttgaatagaatcaagttgaacagcaaacagtgtagaatataccgagtaaggatcaatgatttagaggctgcttttatttataatgacccaaccttggaagtttgtcacagtgaatcaaaacagagaaacctcaattatttttccaatgcttatgcagctgcagttagtgctgtggaccctgatgcaggaaatggagaactttgcattaaggttccatcagagctatggaaacacgttgatgagttaaaggtcctgaagatacacatcaatttttctttggatcagcccaaaggaggtcttcattttgtggtacccagtgtagagggaagtatggcagagagaggtgctcatgttttctcttgtgggtatcaaaattctacaagattttggttcccttgtgttgattcatactctgaattgtgtacatggaaattagaatttacagtagatgctgcaatggttgctgtttctaatggcgatttggtggagacagtgtatactcatgatatgaggaagaaaactttccattatatgcttaccattcctacagcagcgtcaaatatctccttggccattggaccatttgaaatactggtagatccatacatgcatgaggttactcatttttgtttgccccaacttcttccattgctgaaacataccacatcataccttcatgaagtctttgaattttatgaagaaattcttacatgtcgttacccatactcctgttttaagactgtcttcattgatgaggcttatgttgaagtggctgcttatgcttccatgagcatttttagcacaaatcttttacacagtgccatgattatagatgagacacctttgactagaaggtgtttagcccaatccttggcccagcagttttttggttgtttcatatctagaatgtcttggtctgatgaatgggtgctgaagggaatttcaggctatatctatggactttggatgaaaaaaacttttggtgttaatgagtaccgccattggattaaagaggagctagacaaaatagtggcatatgaactaaaaactggtggggttttactacatcccatatttggtggaggaaaagagaaggataatccggcttcccatctacacttttcaataaagcatccacatacactgtcctgggaatactacactatgtttcagtgtaaagcccaccttgtgatgagattgattgaaaataggatcagtatggaatttatgctacaagttttcaataaactgctaagtctggctagtactgcttcatctcagaagttccagtcacatatgtggagtcagatgttggtttccacatctgggtttttgaaatccatttcaaatgtctctggcaaagatattcagccgttaataaagcagtgggtagatcagagtggagtggtaaaattttatggaagttttgcatttaatagaaaacgaaatgtcttggaactggaaataaaacaggactatacatctcctggaactcagaaatacgtgggaccacttaaagtgacagtgcaggagttagatggatccttcaatcatacactgcaaattgaagaaaacagccttaaacatgatataccctgccattccaaaagtagaaggaataaaaagaaaaaaatcccactgatgaatggagaagaagttgatatggatctttctgcaatggatgctgattcccctttgctgtggataaggatagacccagatatgtcagtattgaggaaggtagaatttgagcaagctgattttatgtggcagtatcagctccgctatgagagagatgttgttgcacagcaggaatccattttggctttggaaaaattccctactccagcatctcggcttgcactcactgatatattagaacaagagcagtgtttctacagagtaagaatgtcagcttgcttctgtcttgcaaagattgcaaattcaatggtgagcacatggacaggaccaccagccatgaagtcactcttcactaggatgttttgttgtaaaagttgtccaaacattgtgaaaacaaacaactttatgagctttcaaagctattttctacagaagactatgccagttgcaatggctttattaagagatgttcataatctttgtcctaaagaagtcttaacatttattttagacttaatcaagtacaatgacaacaggaaaaataagttttcagataactattatcgtgcagaaatgattgatgccctggccaactctgttacacctgcagtcagtgtgaataatgaagttagaactttggataacttaaatcctgatgtgcgactcattcttgaagaaatcaccagatttttgaatatggaaaaacttcttccgagttacaggcataccatcactgtcagttgtttgagagccatacgggtacttcagaagaacggacatgtgccaagtgatccagctctttttaaatcttatgctgaatatggccactttgtggacattaggatagcagctttggaagcagttgttgattatactaaagtggacagaagttatgaagaactgcaatggctacttaatatgattcagaatgaccctgtaccctatgtaaggcataagattctcaacatgttgactaagaacccaccatttactaagaacatggagtctcccttatgcaatgaagccctggtagatcaactttggaaacttatgaattctggtacttcacatgactggaggttacggtgtggtgctgtggacttgtacttcacactttttggcctcagtagaccttcctgtttacccttgccagagcttgggttggttcttaatctaaaggagaaaaaagctgtcttgaatcctaccataattccagagtcagtagcaggcaaccaagaagctgcaaataatccaagcagtcacccacagctagttggatttcagaaccctttttccagttctcaagatgaggaggagattgatatggatactgttcatgatagccaggccttcatttcccatcatttaaacatgcttgaaaggccgtcaactccagggctctcgaaatatcggccagctagctcccgatctgctttaataccccagcactcagcaggctgtgacagcacacccaccacaaaaccccagtggagtttggaacttgcacggaagggaacaggtaaagaacaagcacctttggagatgagtatgcatccagcggcaagcgctccactctcagtctttactaaggaatctacagcctccaaacacagtgaccaccatcaccaccatcaccatgagcacaagaaaaagaagaagaagcataaacataagcacaaacacaagcataagcatgacagtaaagaaaaggacaaggagcctttcactttctccagccctgccagtggcaggtctattcgttctccttccctttcagactgagaaggggacaaaaagacctttcctttcatgtccagaagaatgtatgtaactaaagctttgtcctctgtgaagaattataaaagggaggggggaaaggattcgcctctcctacagaaattctgaattcatttaagttctaagcatttgatttatgttatttatacagttgggatctaattaggaaaatgtgttttgtagttctggataaactatttcatccgctgtttcctccccaaaacacacacacagagcaaactccctttcataaaagccctcatatccactggcagtccccgttcgcatcatggtctccatgtgtaccgccaaagtcaattatgtttgaaagcctttggtggatgttatggggcaaagttatgatttacacagaagcaactgccaaatctgtggtgcaaccactatctccagtgaaatattgtataacaccatttggaactactgaaaagacagtggcttttctacagtactcttccttattgcaccatttttgtattaacgtagaaactaagcatcagaatttatgaacaaagaatatgttatttttccttttgctctaaaatactgagatttggggaagcaattcttttttaaaaaaattttgaataactatcttttgataacacattcggcggttacgatgttggaatttagcagaactatcaaatccaaaattattttcaaatcaagatgtttaaattataagtttttttgttttgttttccagtaagtataaatgaaaatattcatatgtaaaatatgttttgcttaatgtggacaatttacacacccaacacatactgtttccaaaattatttctatatgacacaaagtatgatacctttaaaaaggtgagcttatatattgtttattaacctggaaatagacaatttggctctcataccataagcatttaaaaacatatgaaatattttgatttctttatatggtggtgtgtttttatttctgaattttccatgtgctttaatatttgtttaagaatattttttatatctgttcaatttttatcattccccttatcattagaaagtttgacaaaaatacttgaatcttggacctctaaatatacttttagttgtgtttaacttgtttaataaataactttttaagttgaaaaaaaaaaaaaaaaaaaaaaaaaaaaaa

SEQ ID NO: 1007 - DNA, 2182 bp, Homo sapiens
atgtgcgagagttactccaggtcgttgttgagggtctcggtggcgcagatctgccaggcgctgggctgggactcggtgcagctcagcgcctgccacctcctcacggacgtgctgcagcgctatctgcagcagctgggccggggctgccatcggtactctgagctctatggccgaacagacccaattttggatgatgttggtgaagctttccagctgatgggggttagtctacatgaactagaagactatattcacaacattgagcctgtcaccttcccacaccaaattccgtcatttcctgttagcaagaacaatgtacttcagtttcctcaacctggaagtaaagatgcagaggaaagaaaagaatacattcctgattacctgccacccattgtgtcttctcaagaagaagaagaagaagagcaggtgcccactgatggaggcacatcagcagaagccatgcaggttcccttggaagaagatgatgaattggaggaggaagaaattattaatgatgagaatttcctgggcaagagaccactggatagtcctgaagctgaagaactgccagccatgaagcggcctcggctattaagcactaaaggggacacgctagatgttgtgttattggaagctcgagagccactcagctcaataaatactcaaaagatcccaccaatgctttctccagtccatgtacaggacagtacagacttggcacctccctcacccgagccgccaatgttggctccagttgcaaaatcacaaatgccaactgcaaaaccattagaaacaaagtcatttacacctaaaacaaagactaaaactagctctccaggacagaagactaaatcacctaaaaccgcccagtcaccagcaatggtcggaagtcctattcgatcaccaaaaactgtatccaaagaaaagaaatcacctggacgttccaagagccccaagagtcccaagagccccaaggtcacgactcacattccccaaacacctgtgagacctgaaacgcccaacaggactccttcagctacactcagtgaaaaaatcagtaaagagactatccaggtaaaacaaatacagacaccccctgatgctgggaaactgaacagtgagaatcagccgaaaaaggctgtggtagcagataaaacgattgaggcctctatcgatgctgtgattgcacgagcctgtgctgagcgagagccagatcctttcgaattttcttctggatcggaatctgaaggagacatttttactagccctaagagaatttcaggcccggagtgtactactcccaaagcttccacttccgcgaacaatttcacaaagtcaggatccactcctctgcctctttccggtggaacctcaagttccgataactcatggacaatggatgcctccattgatgaggttgtacgtaaagcaaaactgggaacaccttcaaatatgccccccaactttccttatatctcttctccgtcagtgtctcctcccactcccgaacctctccacaaggtgtatgaggagaaaaccaagctgccttcctccgtggaggtaaagaagaagttgaaaaaggaactaaagactaaaatgaaaaagaaagaaaagcagagagatagggagagggaaaaagacaagaacaaggacaaaagtaaggagaaggataaagtgaaagagaaagagaaagacaaggaaactggcagggaaacaaagtatccctggaaggaatttcttaaagaggaagaggcagatccctacaagtttaaaatcaaagaatttgaagatgttgatcccaaagtgaaattgaaagatggacttgtgaggaaggagaaagagaagcataaagataagaagaaagatagagagaaaggcaagaaagataaagataagagagagaaagaaaaagtgaaagataaaggcagagaagataagatgaaagccccagcacccccactggtgttgcccccaaaagagttggccctgcccttgttcagccctgccacagcctccagggtcccagccatgctgccatctttgttgccagtgcttccggaaaaactgtttgaggagaaagagaaggtgaaggagaaagaaaagaaaaaggacaaaaaggagaagaagaaaaagaaggaaaaagagaaggagaagaaggagaaggaaagagagaaagagaagg

SEQ ID NO: 1008 - DNA, 4647 bp, Homo sapiens
atggcggcgggctcggatctgctggacgaggtcttcttcaacagcgaggtggacgagaaagtggtgagcgacctggtgggctcgctggagtcgcagctggcggccagcgcggcccaccaccaccacctcgcgccgcgcacgcccgaggtgcgggccgcggccgccggcgcgctcgggaaccatgttgtgagcggcagcccggccggagccgcgggcgcagggccggccgcccccgccgagggcgcgcccggagcggcgccggagccgccccccgcaggtagagcgcggccggggggcggggggccgcagcgcccgggccccccctcaccgcgccgcccccttgtccccgcagggcccgcgccgcccgccgcgaagctgaggccgccgcccgagggcagcgcggggtcctgcgccccggtgcccgccgccgccgccgtcgccgcggggcccgagcccgcccccgccggccccgccaagcccgccggccccgccgcgctggccgcccgcgccggccccggccccgggcccggccccggccccggccccggccctggccctggcaagcccgccggccccggcgccgcgcaaactttgaatgggagcgccgcgctgctgaactcgcaccacgccgccgcacctgctgtcagcctggtcaacaacgggcccgccgcgctgctgccgctgcccaagcccgccgcccccggcactgtcatccagacgccccccttcgtgggcgccgccgcgccccccgcgcccgccgcgccctcgccccccgccgcccccgcgcccgccgcccccgccgccgccccgcccccgccaccccccgcgcccgccactctggcccggccgcccggccaccccgccggacccccgaccgccgcgcccgccgtgccgccccccgccgccgcccagaacgggggcagcgccggggcagcccccgcccccgccccggccgccgggggccccgcgggggtcagcggccaacccgggcccggcgcggcggctgcggcgccggcgccgggggtcaaggccgagtcgcccaagagggtggtgcaggcggcgcccccggcggcgcagaccctggcggccagcggcccggccagcacggcggccagcatggtcatcgggccaactatgcaaggggcgctgcccagcccggccgccgtcccgccgcccgcccccgggacccccaccgggctgcccaaaggcgcggccggcgcagtgacccagagcctgtcccggacgcccacggccaccaccagcgggattcgggccaccctgacgcccaccgtgctggccccccgcttgccgcagccgcctcagaacccgaccaacatccagaacttccagctgcccccaggaatggtcctcgtccgaagtgagaatgggcagttgttaatgattcctcagcaggccttggcccagatgcaggcgcaggcccatgcccagcctcagaccaccatggcgcctcgccctgccacccccacaagtgcccctcccgtccagatctccaccgtacaggcacctggaacacctatcattgcacggcaggtgaccccaactaccataattaagcaagtgtctcaggcccagacaacggtgcagcccagtgcaaccctgcagcgctcgcccggcgtccagcctcagctcgttctgggtggcgctgcccagacggcttcacttgggacggcgacggctgttcagacggggactcctcagcgcacggtaccaggggcgaccaccacttcctcagctgccacggaaactatggaaaacgtgaagaaatgtaaaaatttcctatctacgttaataaaactggcttcatctggcaagcagtctacagagacagcagctaatgtgaaagagctcgtgcagaatttactggatggaaaaatagaagcagaagatttcacaagcaggttataccgagaacttaattcttcacctcaaccttaccttgtgcctttcctgaagaggagcttacccgccttgagacagctgacccccgactccgcggccttcatccagcagagccagcagcagccgccaccgcccacctcgcaggccaccactgcgctcacggccgtggtgctgagtagctcggtccagcgcacggccgggaagacggcggccaccgtgaccagtgccctccagccccctgtgctcagcctcacgcagcccacgcaggtcggcgtcggcaagcaggggcaacccacaccgctggtcatccagcagcctccgaagccaggagccctgatccggcccccgcaggtgacgttgacgcagacacccatggtcgccctgcggcagcctcacaaccggatcatgctcaccacgcctcagcagatccagctgaacccactgcagccagtccctgtggtgaaacccgccgtgttacctggaaccaaagccctttctgctgtctcggcacaagcagctgctgcacagaaaaataaactcaaggagcctgggggaggttcgtttcgggacgatgatgacattaatgatgttgcatcgatggctggagtaaacttgtcagaagaaagtgcaagaatattagccacgaactctgaattggtgggcacgctaacgcggtcctgtaaagatgaaaccttcctcctccaagcgcctttgcagagaagaatattagaaataggtaaaaaacatggtataacggaattacatccagatgtagtaagttatgtatcacatgccacgcaacaaaggctacagaatcttgtagagaaaatatcagaaacagctcagcagaagaacttttcttacaaggatgacgacagatatgagcaggcgagtgacgtccgggcacagctcaagttttttgaacagcttgatcaaatcgaaaagcagaggaaggatgagcaggagcgggagatcctgatgagggcagcaaagtctcggtcaagacaagaagatccagaacagttaaggctgaaacagaaggcaaaggagatgcagcaacaggaactggcacaaatgagacagcgggacgccaacctcacagcactagcagcgatcgggcccaggaaaaagaggaaagtggactgtccggggccgggctcaggagcagaggggtcgggccccggctcagtggtcccaggcagctcgggtgtcggaacccccagacagttcacgcgacaaagaatcacgcgggtcaacctcagggacctcatattttgtttagaaaatgaacgtgagacaagccattcactgctgctctacaaagcattccttaagtgacacaggaggacgcctggggactttttatatatttgcagattacgcctttttgtaacgagcaaatgggatattgtttaaaaaacagccacctctttacaatggaacagttttatattcctgtttctaaatcagctcttcagtgtgaaagaaaacacgtttctgtaacagagagaacacaaaggcctgtggatactcttaaaggacaattaaatcttaactcatcttgattgagtggccttcctgccaaacaagccatatataaagactgatggaatcgttagcaaataattagctgccctctgtcaactcatagcagtttctgcattatttgtgcattttggtttagttctacctaacttactatgtaggtgtatgtctacagccgatgacctcatttcgtttattttatttttgtaatagtcagttggcaaagcaaactgattttttagactatttatcttccttcccttcccctcccaccccgctctcctctctgccccctgccctcccctcccctcccttcccctccactccgctgagaatcctggaggaatacacaattcatcgttgcacccccacctcagagtgtaatcgcatttctgcttggtagaggccgagcccagcaaaggtggctccttctgaatgtgtggtcagcatctgtacaaatgcattttatttgctatagtttgtaaagctgtaaagttaaaagagatgaaaaccttttcagcataaatatattttacttgcactgtgttttttagctaaaagtgaaaacctagattaaataaaatcaaagttgagaagaatcatcaaaagactgtttctcggtgtgaatcaagtgttgaaaaatggttggtgtattttgtcagtaattgtacataacttttggcacatgacatagaaatggctatgtaaactataattattttgctaagagactgtatgcaagccttgggccgactttacagacgtccagagcaaagccccttctttgtacctatttttttattacaaatatactaattggttctttctattttcagaggttattgtatgaaattgtctattgatagtacttttatgactgtaaatactctggctttctccgtgtgaattctcacattagactttaattcgagcgcgtgtgaactgaacgctgatcagtattttttatcaacacctgagaactgttacaccttttattttgtcttttaggaaatccctgtctttccattttttcatgtaaattttgcacagttacttgttcatatgtaaatattttactttcagaaatgaagtttttaattgctattgttttatataggattgaaagaaaattaactcctttattaaaaacaaatttatctgtaaaaaaaaaaaaaaaaaaaa

SEQ ID NO: 1009 - DNA, 2556 bp, Homo sapiens
gggaccctggtgaccaaagtggctccggtcagcgcccctcctaaagtcagcagcggccctaggctgcctgctcctcagatagtcgccgtgaaagcccccaacaccacgacaatccagtttcctgctaatttgcagcttcctccaggaaccgttttgattaaaagtaacagtggtccgttgatgttggtatctcctcagcaaactgtaacaagagccgagaccacaagtaacataacctcaaggccagcagtaccagcgaatcctcaaacagtcaaaatctgtacagtgccgaactctagctcacaattaatcaagaaagtggcagtgacacctgttaaaaaattggcacaaataggaactactgtggtaaccactgttccgaagccttcctcagtacaatctgtggctgtgccaaccagtgtcgtcacagttactcctggaaagccattgaatactgtaactaccctgaagccttcaagtttgggagcatcatccactccttcaaatgagcccaatcttaaagcagagaactcagcagctgttcagattaatctttctccgacaatgctagaaaatgtgaagaaatgcaagaacttccttgcaatgttaataaaactagcatgtagtggatcacagtcccctgaaatggggcaaaatgtgaagaagctggtggaacaacttttggatgcaaaaatcgaagcagaagaatttactaggaaactgtatgttgaactcaagtcttcacctcagcctcacctggttccttttcttaagaaaagcgtggttgccttacgacaacttctgcctaactcccagagcttcatccagcaatgtgttcagcagacttctagtgacatggtcattgctacctgtactacaacagtaacaacttctcctgtggtgacaactacagtgtcctcaagccagtctgaaaagtcaattattgtttctggagcaacagcacccagaactgtgtcagtgcaaactttgaacccacttgctggtccagtgggagcaaaagctggagttgtgacacttcattctgtgggcccaactgctgcaacaggaggaacaacagctggaactggtttgcttcagacttcaaaaccacttgtgacatctgtggcaaacacagtgaccacggtctcactgcaacctgaaaagccagttgtctctggaacagcagtaacactgtcccttccagcagtaacttttggagaaacttcaggtgcagctatttgtcttccatctgtgaaacctgttgtttccttctgctgggaccacatctgcaagcctgttattgggactccagttcaaatcaaacttgcccagccgggccctgtcctttcacaaccagctgggattccaacaggcagttcaagcaagcaactattctcattgtttcacgtagttcagcagccttcaggaggcaatgaaaaacaagtgaccacaatttcacattcctcaacattgaccattcagaaatgtggacagaagacgatgccagtgaacaccataatacctactagtcagtttcctccagcttccattctaaagcaaattactctgcctggaaataaaattctgtcacttcaagcatctcctactcagaaaaatagaataaaagagaatgtaacatcatgcttccgagatgaggatgacatcaatgatgtgacttctatggcaggggtcaaccttaatgaagaaaatgcctgcatcttagcaacaaactctgaattggttggcacactcattcagtcatgtaaagatgaaccatttctttttattggagctctacaaaagagaatcttagacattggtaaaaagcatgacattacagaacttaactctgatgctgtgaacttgatctcccaagcaacacaggaacgactacgaggccttctagaaaaactgactgcaattgctcagcatcgaatgactacttacaaggcaagtgaaaattacatcctgtgtagtgataccaggtcacagctcaaatttcttgaaaagctggatcaattggagaagcagagaaaggatttggaagaaagagaaatgttacttaaggcagccaagagtcgttctaataaagaagatccagaacagctgagattaaagcagaaagccaaagagttacagcaattggaacttgcacagatacagcatagagacgctaatctcacagctcttgcagctattggaccaaggaagaagagaccactagaatctggaattgagggcttaaaagacaaccttcttgcttctgggacatccagcctgacagccaccaaacagttgcatcgtccaagaatcacgagaatctgcctcagggacttgatattttgtatggaacaggaacgggagatgaagtattctcgagctctatacctggcccttctgaagtgaccactccactcttccatccacatccttgctatttactgccaaagaagacacaaagcattgttgcactgtcctgaaatttcaatttctggaaaataacaccaacatgaaagagcattgtttacgattagaactttattaactcttacctat

SEQ ID NO: 1010 - DNA, 2016 bp, Homo sapiens
atgagtgtgagctcgtgagtgggcgccgccgccaccgcccccgccgccgtcgtctcggtagcagccttcgccacgccggggtcttcagctccactggggccatgtcagagcgagaagagcggcggtttgtggagatccctcgggagtctgtccggctcatggcggagagcacgggcctggagctgagcgatgaggtggcggcgctgctcgcagaggacgtgtgctatcgtctgagagaggccacgcagaatagctctcagttcatgaagcacaccaaacgccggaagctgacggttgaggacttcaacagggccctcagatggagcagcgtggaggctgtgtgtggttacggatcacaggaggcactgcccatgcgccccgccagggagggtgaactctactttcctgaggatcgagaggtgaacctggtggagctggccctggctaccaacatccccaaaggctgtgctgagacagctgtcagagttcatgtctcctacctggatggcaaagggaacctggcacctcaaggatcggtgcccagtgctgtgtcttcactgacagatgaccttctcaagtactatcaccaggtgactcgtgctgtgctaggggatgatccgcaactgatgaaggttgcactccaggacttgcagacgaactccaagattggggcactcctgccttactttgtttatgtggtcagtggggtgaaatctgtaagccatgacctggagcaactgcaccggctgctgcaggtggcacggagcctatttcgtaatccgcacctgtgcttggggccctatgtccgctgtctggtgggcagtgtcctctactgtgtcctggagccactggctgcctccatcaaccccctgaatgaccactggactctgcgggatggggctgccctcctgctcagccacatcttctggactcatggggaccttgtaagtggcctctatcagcatatcctgctatccctgcagaagatcctggcagatcctgtgcggccgctctgctgccactatggagccgtggtggggctgcatgctcttggctggaaggcagtagaacgagtcctgtacccacacctgtccacctactggacaaacttgcaggctgtgctggatgattattcagtatctaatgcccaggtcaaagcagatggacacaaagtctatggagccattctggtggcggtagagcgactgctgaagatgaaggcccaggcagcagagcccaacaggggtggcccaggtggcagggggtgccggcgcctggacgacctgccatgggacagccttctctttcaagagtcgtcctccgggggcggtgcagaacccagctttgggtccggcctcccgctgccgccagggggcgcggggccggaggacccttctctttcggtgaccctggccgacatctaccgggagctctacgccttcttcggtgacagcttggccacacgctttggcaccggccagcctgcacccacggctccgcggccgcccggggacaagaaggagccggcggcagccccggactcggtgcggaagatgccgcagctgacggcaagcgccatagtcagcccgcacggcgacgagagcccccggggcagcggcggaggcggccccgcgtcggcctctgggcccgccgcctctgagagcaggcccttgccgcgcgtgcatcgggcgcgcggggcaccccggcagcagggccccgggaccggcacccgcgacgttttccagaagagccgtttcgccccgcgcggcgccccgcactttcgtttcatcatagccgggcggcaggctgggaggcgctgccgcgggcgccttttccagactgccttccccgcgccgtacgggcctagcccggcctcgcgctacgtgcagaaactgcccatgatcggccgtaccagccgccccgcccgccggtgggcgctctcggactactcgctgtacttgccgctctgagtcagtggccccttcgttccttgtaaataaatcccgcccccggaaa

SEQ ID NO: 1011 - DNA, 2310 bp, Homo sapiens
acttccgtttttgctgggtaggcgacccggacggagggccggcgaggtgcggggtctggtgatgcgagctgcgcctctcggcaagatttcgcgctgcccatcccgggccctttcatcagtaatcggtagtggatcactctgccaagcggcaggaagaattaaggaaacgacaaggagacgctcggctctctcccgcttggctccttgcggcctcctcttcccttcgctccggcccggtgaaactgaacttataatcgtcactggattgtaagtacccgaggcgaagagagctcgctgagccctgattttttgagtgtctttgttccgggagagtttgtgagttgaaagtatctctgctgggctttctgggccgaaaaccgttccgggggagccgccatttgctttcctgttccctagctagctagctagctctctccgcgttgtccggcagcggcacctagaggttgggacttggcattgcatctgatttaatgaacttaagtctgtgaataagcctttgtgttaacgactggtattcggtcacagcatatttagagaaaagacttggagcttaaataaaaactaaggcaaaatagacgcttagctgctgatctacagagaacttcttgtaattaaaagatttcaattcatagcaaactggtgttttaaactattgcagtagctggaactttttagtgtaaccagcatttattggagaagtgaatcacaaggaaataaagatgagtaaaagcaaagatgatgctcctcacgaactggagagccagtttatcttacgtctgcctccagaatatgcctctactgtgagaagggcagtacagtctggtcatgtcaacctcaaggacagactgacaattgagttacatcctgatgggcgtcatggaatcgtcagagtggaccgtgttccattggcctcaaaattagtagacctgccctgtgttatggaaagcttgaaaaccattgataaaaaaactttttacaagacagctgatatctgtcagatgcttgtatccacagttgatggtgatctctatcctcctgtggaggagccagttgctagcactgatcctaaagcaagcaagaaaaaggataaggacaaagagaaaaagtttatctggaaccacggaattactctgcctctaaagaatgtcaggaagagaaggttccggaagacagcaaagaagaaatatattgaatctccagatgttgaaaaagaagtgaaacgattgctgagtacagatgctgaagctgttagtactcggtgggaaataattgccgaagatgaaacaaaggaggcagaaaatcaaggcctggatatctcttctccaggaatgtctggtcacaggcagggccatgactcattagaacatgatgagcttcgggagatattcaatgacctcagcagcagcagtgaggatgaagatgagacccagcatcaagatgaagaagatataaacatcattgacacggaggaagatctggagagacagctacaggacaagctaaatgaatcagatgaacagcaccaggaaaatgaaggaaccaatcagctggttatgggaattcagaagcagattgacaacatgaaaggcaagctccaagagacccaggacagggcaaaacgacaagaggatctcatcatgaaagtggaaaatctggctctcaagaacagatttcaggctgtactggatgagctcaaacaaaaggaagaccgagaaaaggagcaactcagctctttgcaagaggagctagaatcactcctagagaagtaaaaagaactgatatttaatttcagtcttcagactggtcagcattagaaaattcttggctttattgtactgggtattaagaccttgctcttcctagtccttttaatgctgtgtgttctgttaagttctttcatttgtttgtaattttgtttttcagcaaatttatattgttttgctaggtgttcatcctataagaagcaggattgtataggcagaaaaatgattgtaggaaagttgcaggattagcggaatgtatggttcaaccttaattatagcttcattgcaggactttactgtttctccattttctagaagctgctgttgctgctttgtgatgacgtgagatcaataagaagaacctagtctagagacaatgatgctagtttgcatatgttttcctatgcaataattgttttcccagttattcaaagcagctttctatatgtagagatgcaaattattaagttgtttccaatacaataaataaaagcatctgtttttcactttaaaaaaaaaaaaaaaa

SEQ ID NO: 1012 - DNA, 1245 bp, Homo sapiens
gtgggcttttgctgccgcccgccccttccggctcctccctgtagagcaaagggcacgtgagcgaggcgcccgaagccgtcgcggcggggaccatgttgcttccgaacatcctgctcaccggtacaccaggggttggaaaaaccacactaggcaaagaacttgcgtcaaaatcaggactgaaatacattaatgtgggtgatttagctcgagaagtctgatcatcggatatcatggagtctggcaagacggcttctcccaagagcatgccgaaagatgcacagatgatggcacaaatcctgaaggatatggggattacagaatatgagccaagagttataaatcagatgttggagtttgccttccgatatgtgaccacaattctagatgatgcaaaaatttattcaagccatgctaagaaagctactgttgatgcagatgatgtgcgattggcaatccagtgccgcgctgatcagtcttttacctctcctcccccaagagattttttattagatattgcaaggcaaagaaatcaaacccctttgccattgatcaagccatattcaggtcctaggttgccacctgatagatactgcttaacagctccaaactataggctgaaatctttacagaaaaaggcatcaacttctgcgggaagaataacagtcccgcggttaagtgttggttcagttactagcagaccaagtactcccacactaggcacaccaaccccacagaccatgtctgtttcaactaaagtagggactcccatgtccctcacaggtcaaaggtttacagtacagatgcctacttctcagtctccagctgtaaaagcttcaattcctgcaacctcagcagttcagaatgttctgattaatccatcattaatcgggtccaaaaacattcttattaccactaatatgatgtcatcacaaaatactgccaatgaatcatcaaatgcattgaaaagaaaacgtgaagatgatgatgatgacgatgatgatgatgatgactatgataatctgtaatctagccttgctgaatgtaacatgtatacttggtcttgaattcattgtactgatattaaacatgcatgctggatgttttcaagttgtgttttagaaaactaataataatgagtaaacacagttaccatacttttcaattgaaatgaaggtttttcatcagccttaaaagtgtaagaaaaataaagttgtcattcattcgaaaaaaaaaaaaaaaaaaaaa

SEQ ID NO: 1013 - DNA, 5018 bp, Homo sapiens
gcccgggactatcccttcgcggtgtagcggcagccggagacctggctgaggaggcaaccgcgtagacacctccctgcttagaaaacaaacactgaaccagaccgatcccagttggagggttcgaaaatgttccagacagcctgtcgggaggggttgttgttgctgttggactaaatagctattcctgattggtcatgtatagggttttttaaggcgggtggggggaggagggggtagaggaaaggctccaaacacctgcaggttgggggcggaaagctgtttgcgattccctggactggttggtcggggacaggaggtaattcccagccattgacccccatttctctctctccctccctcttgccctgcctctttctctccacccctatctttcctggaaactcgctttgggcgcggcagatcgcccaggaccacaccgcagcgtaactgcaggcctctcagcgaaaaagggggaaagcaaagacccgggtgtgcatcctcttcctcggcttccgcccctttccggcggagtggagatcctattcagaggggccggtctctctaaatatgccccaggatgaccgagcggccgccgagcgaggcggctcgcagtgacccccagctagagggacgggacgcggccgaggccagcatggcccccccgcacctggtcctgctgaacggcgtcgccaaggagacgagccgcgcggccgcagcggagcccccagtcatcgaactgggcgcgcgcggaggcccggggggcggccctgccggtgggggcggcgccgcgagagacttaaagggccgcgacgcggcgacggccgaagcgcgccatcgggtgcccaccaccgagctgtgcagacctcccgggcccgccccggcccccgcgcccgcctcggttacagcggagctgcccggcgacggccgcatggtgcagctgagtcctcccgcgctggctgcccccgccgcccccggccgcgcgctgctctacagcctcagccagccgctggcctctctcggcagcgggttctttggggagccggatgccttccctatgttcaccaccaacaatcgagtgaagaggagaccttccccctatgagatggagattactgatggtccccacaccaaagttgtgcggcgtatcttcaccaacagccgggagcgatggcggcagcagaatgtgaacggggcctttgccgagctccgcaagctgatccccacacatcccccggacaagaagctcagcaagaatgagatcctccgcctggccatgaagtatatcaacttcttggccaagctgctcaatgaccaggaggaggagggcacccagcgggccaagactggcaaggaccctgtggtgggggctggtgggggtggaggtgggggagggggcggcgcgcccccagatgacctcctgcaagacgtgctttcccccaactccagctgcggcagctccctggatggggcagccagcccggacagctacacggaggagcccgcgcccaaacacacggcccgcagcctccatcctgccatgctgcctgccgccgatggagccggccctcggtgatgggtctgggccaccaggatcagccaggagggcgttcttaggctgctgggatggtgggcttcagggcaggtggggtgagaattgggcggctctgaagcaaggcggtggacttgaactttcctggatgtctgaactttgggaagcctttactgaccctggggctggcttttctgtttcctgtaccagtaggagatcagaaaaatggagcaaagtggtaggtactttttgtgaagacggcacggtcttccctcttccctcagtcccaaatccttcccaagtaagaggctggagttgtcactgcttttggcctggagtttgggatccctgtctttcctaagacctggggttgtcagctctcatctgaggcatccagcagtctctgccttgcctttagcccctcccaagctggctggggtggcctgtgtggccacttctgtccatatttataggtacccaatagctgcccatttcgtgagccccatcttcacccaggcctatgttgatccatccagcttgccagatgctgcagagtcacaagcctcgaggtgccttcttcagggcctggttgaagaagatgatcagtggacagtctgctctagatgagctgggccggagggtcaggaaacccagtcgcccttacttcttgccctggggatcaaagttctgctttctccccaatgagacttgccttcctaagcctgtggctgtggagacaatgtctgcagccctgagaaagccctgtcgggctttgtgtgaaggcagagaaagggacaatgatagtagagtgatatggagcaagagatattttgggcatgtgggcttcaactcctcgacatcactgttcatgctggcgagtgaatgccagtgtgctgatgggcgtacgctggtgctgagtagatgcgcagccccatctgtgcattctcctggatgcttagagggatttctttgctgtaagatgtctgtttgctgatggtctggtctatgttccgaattgagcacaaaacctgtcctatgaatgctttgcatttggaatttttgcttgacttcagttattggtggaatctttagcgctcaataggaccaggatccagcctcacttctagggtatgggaaatccaatcagagaccaggccctggctaagacccaaacatatgcacattcacttagcagaaccttaaacacccctcagttgtgcagcttttggtcatcaagggtgcgtctgggaggttggtttaatgcaatagaagtgctcccctctgaaagttgtacatgaaatttttgtaaatcacatccttatccttcatcttttaaagaaataaccactgcaagtccttttgtaaagtgaagaatccttttgtagaatgaaccactgccccttcattgatttcctgtgtcaatccagatggtgggatgtggttttcttaaggtgaggcctgtctgtgacctgcatctaagcccatgggacaaattgcacagaagtcctgtatgtctgtcattgtacccttaagtcaccctagccctctccctctaggctctgccttcgaggtcagaggagagatagcctgtggccctgtcctgccatgcaagaactcatcactgtggctgtctggaaagcccccccttatagtttgggcttcagcctagtggcttgtcctcaccatgatggggccctaattcagccatgtacagacagagaatatgtctgctcctttccccttccttttaagtaaggtccaattctcgagcttggggcaacattgttcacctttgtagcactcaggctctccattcaatttcaggctccccagatcatgttttggtgaaaattagggttggttcctttccaacgtttggaagatcctgtgaggagccccatctgtctaaagatagagtcattgctgtaggatctaaggctgtttgcttcaccgtggattcgcttgagttaggaatgagaagtagccacagtatggatgggtggatgggttttatgagatggatcacatattttattaagaactcaaacttctggctccctcttctttcagacttgccatgtgactctggcttggcctatctcctagggctatggtgtggactgaatgggatcatgaaagtagacagttttgagaacgtaaagaactttttcttttccctcaatctcaatcctgcagtggggtttcgcagcctgagtccacgacctaggcagtaggccggtgtgcctgactgcccagcatttgggtaatttagattgtaaaccgctttggcctgagttattgagattgtcctcatttctccagattatctatttgtgtgtgtgtgtgtgtgtgtgtgagagacggtgtcttgttctgtcactcaggctggagtacagtggtgccatcattgctgtctgcagccttgaactctgggctcaagcaatcctctcacctcagcctcccgagtagggaggaccacaggtgtgagccaccacacctggctaatttttacttttttttttttttggtagagatggagtcttgctatattgcccaggctggtcttgaagtcctggcttcaggcaattctcctgcctttgcctccagaagcactgggatcacaggtgtcagccattgcacccagcccagattgtcttaatttctatcttgttccaaggccagggacagtaataagaatggaaaagagatatgggaacactggcagactgtgtaaaatgtaatgcaactacccaaaacaagcctggtaggaaagggcaagtctttaggtctttgtaagaactaaagaagatctgtaatttttattttcaccctctgtaccccatgaccttatccttcctctccttccttgttacccatgaaaaactggcaacattccaagaatagcatctgtacaaaggggaaagaacataaaggtaaaacaaaacaaaacaacattttgagaacaaagatgaccataaccactgaagggaatcacatcttttaagacaaattcatattcttttatttgttatggcagatgacaagatggtacaacctttattcttttccaaaataaaacaaagggcacagcatctgtagtcagccgacaactatttcggccttttgggggtgggtctggccgtacttgtgatttcgatggtacgtgaccctctgctgaagacttgccccctgcccgtgtacatagtgcattgtttctgtgggcgggcccagcactttccgtcaacgttgtactgtatgtgatgaattgcgttggtctctgcatttttctgcagaagaggagtaaccgctccaggtaccttgacctttgtacagcccagaggccaacactgtgggtgtgtgactctttagcaaaaaaaacccatgtggtgatgatgtgtatatatatgtgaggatgtatcgggaagatttctaaataaaagttttacaaaggggaaaaaaaaaaaaaaaa

SEQ ID NO: 1014 - DNA, 656 bp, Homo sapiens
ccctgagggccctttctctttccatctcaggaactcaaacatgaccaggaagatcttcacaaataccagggagcggtggaggcagcagaatgtcaacagcgcctttgccaagctgaggaagctcatccccactcaccctccagacaaaaagctgagcaaaaatgaaacgcttcgcctggcaatgaggtatatcaacttcttggtcaaggtcttgggggagcaaagcctgcaacaaacgggagtggctgctcaggggaacattctggggctcttccctcaaggaccccacctgccaggcctggaggacagaactctgcttgagaactaccaggttccttcacctggtccaagccaccacattccttagtgtggctctggctgtcatctcccagggcagcacttgcccagaaatcactgcctgtggacagacttttgcatgttccagagttgacctgatgataactcgtgaagcatgaattctagcttcctgggaggtggctcagagacagctgcagggagctgaaagaagccatgaggaatgtcacttgtgggccgccaccccccagggatgtcaggtagagcggcctacctctgcctattttaaatccaggttctgcataagacttttggagaaaaaattctaaataaaaaaaaaa

SEQ ID NO: 1015 - DNA, 1921 bp, Homo sapiens
ggcggaagtgacattatcaacgcgcgccaggggttcagtgaggtcgggcaggttcgctgtggcgggcgcctgggccgccggctgtttaacttcgcttccgctggcccatagtgatctttgcagtgacccagcatcactgtttcttggcgtgtgaagataacccaaggaattgaggaagttgctgagaagagtgtgctggagatgctctaggaaaaaattgaatagtgagacgagttccagcgcaagggtttctggtttgccaagaagaaagtgaacatcatggatcagaacaacagcctgccaccttacgctcagggcttggcctcccctcagggtgccatgactcccggaatccctatctttagtccaatgatgccttatggcactggactgaccccacagcctattcagaacaccaatagtctgtctattttggaagagcaacaaaggcagcagcagcaacaacaacagcagcagcagcagcagcagcagcaacagcaacagcagcagcagcagcagcagcagcagcagcagcagcagcagcagcagcagcagcagcaacaggcagtggcagctgcagccgttcagcagtcaacgtcccagcaggcaacacagggaacctcaggccaggcaccacagctcttccactcacagactctcacaactgcacccttgccgggcaccactccactgtatccctcccccatgactcccatgacccccatcactcctgccacgccagcttcggagagttctgggattgtaccgcagctgcaaaatattgtatccacagtgaatcttggttgtaaacttgacctaaagaccattgcacttcgtgcccgaaacgccgaatataatcccaagcggtttgctgcggtaatcatgaggataagagagccacgaaccacggcactgattttcagttctgggaaaatggtgtgcacaggagccaagagtgaagaacagtccagactggcagcaagaaaatatgctagagttgtacagaagttgggttttccagctaagttcttggacttcaagattcagaatatggtggggagctgtgatgtgaagtttcctataaggttagaaggccttgtgctcacccaccaacaatttagtagttatgagccagagttatttcctggtttaatctacagaatgatcaaacccagaattgttctccttatttttgtttctggaaaagttgtattaacaggtgctaaagtcagagcagaaatttatgaagcatttgaaaacatctaccctattctaaagggattcaggaagacgacgtaatggctctcatgtacccttgcctcccccacccccttctttttttttttttaaacaaatcagtttgttttggtacctttaaatggtggtgttgtgagaagatggatgttgagttgcagggtgtggcaccaggtgatgcccttctgtaagtgcccaccgcgggatgccgggaaggggcattatttgtgcactgagaacaccgcgcagcgtgactgtgagttgctcataccgtgctgctatctgggcagcgctgcccatttatttatatgtagattttaaacactgctgttgacaagttggtttgagggagaaaactttaagtgttaaagccacctctataattgattggactttttaattttaatgtttttccccatgaaccacagtttttatatttctaccagaaaagtaaaaatcttttttaaaagtgttgtttttctaatttataactcctaggggttatttctgtgccagacacattccacctctccagtattgcaggacagaatatatgtgttaatgaaaatgaatggctgtacatatttttttctttcttcagagtactctgtacaataaatgcagtttataaaagtgttagattgttgttaaaaaaaaaaaaaaaaaa

SEQ ID NO: 1016 - DNA, 1340 bp, Homo sapiens
gcactgtctctatgctccccagcgtctagtctatttattgtcgcggggaagctgcggccgcctcgcacccggaacaacaaagcaaggaagacggagtccgagcctcgggggctcctagcaacgggccggggcgggagttccatggagactggggagcgcgcccgtctcatcctcatccttgtcctccagcttctccttcgcatccgacgcaaccggcagcagcgctgccgccgcgtcctcagccaccgctccctcttcccacggatgtgatcttcgtggtggaaagctaaattttaaaaccaccccaatggatgcagacagtgatgttgcattggacattctaattacaaatgtagtctgtgtttttagaacaagatgtcatttaaacttaaggaagattgctttggaaggagcaaatgtaatttataaacgtgatgttggaaaagtattaatgaagcttagaaaacctagaattacagctacaatttggtcctcaggaaaaattatttgcactggagcaacaagtgaagaagaagctaaatttggtgccagacgcttagcccgtagtctgcagaaactaggttttcaggtaatatttacagattttaaggttgtaaacgttctggcagtgtgtaacatgccatttgaaatccgtttgccagaattcacaaagaacaatagacctcatgccagttacgaacctgaacttcatcctgctgtgtgctatcggataaaatctctaagagctacattacagattttttcaacaggaagtatcacagtaacagggcccaatgtaaaggctgttgctactgctgtggaacagatttacccatttgtgtttgaaagcaggaaagaaattttataattcaccacttaattggttagaatctctaactgagcaccttttaaacctgctgcacattggactcaaaaggaaaactggaccaacaataattgaggaaatagactcttttattcattcacggctacagtgtaagctccagtccctttggattttattccaaaccttgctgtaatataaaaggaagtttacaagacatgatattgctgcttttacaaaaggacattctatttattttcgcagtaattctcatgtccccataagcagagctgtcacagtgtgcactaccttagattgttttattgtcgtcattgttatttttttccattttgagctaatgtgttttatttgtgaatagtcttttacatttttgtatgctgaatatgggcaccaaagaacctgtaaaagttatctttttcaattgaatgtgcacaaataaaagtttggaaaagataaaaaaaaaaaaaaaaaaaaa

SEQ ID NO: 1017 - DNA, 3186 bp, Homo sapiens
caggtgattatcctaattaatgtctatctaattaaattactgtcagcagctaaccaatggcaggagccgtttcatcggctgcacaagcagcaagatcaaaagtgagccttttctgattgctgcatagtgtcaattggccaatctcttctcccagggaaaaaaaaaagtaaatcaaacctttgagaagcatttgctggttgaagtgctttctgtctagtgagggggtctgtggatttctagtttatgataaataggactttaaaaaccagggacgggagggcgagtgttcaggttctagagctatgcagctggagcactgcctttctccttctatcatgctctccaagaaatttctcaatgtgagcagcagctacccacattcaggcggatccgagcttgtcttgcacgatcatcccattatctcgaccactgacaacctggagagaagttcacctttgaaaaaaattaccagggggatgacgaatcagtcagatacagacaattttcctgactccaaggactcaccaggggacgtccagagaagtaaactctctcctgtcttggacggggtctctgagcttcgtcacagtttcgatggctctgctgcagatcgctacctcctctctcagtccagccagccacagtctgcggccactgctcccagtgccatgttcccgtaccccggccagcacggaccggcgcaccccgccttctccatcggcagccctagccgctacatggcccaccacccggtcatcaccaacggagcctacaacagcctcctgtccaactcctcgccgcagggataccccacggccggctacccctacccacagcagtacggccactcctaccaaggagctccgttctaccagttctcctccacccagccggggctggtgcccggcaaagcacaggtgtacctgtgcaacaggcccctttggctgaaatttcaccggcaccaaacggagatgatcatcaccaaacagggaaggcgcatgtttccttttttaagttttaacatttctggtctcgatcccacggctcattacaatatttttgtggatgtgattttggcggatcccaatcactggaggtttcaaggaggcaaatgggttccttgcggcaaagcggacaccaatgtgcaaggaaatcgggtctatatgcatccggattcccccaacactggggctcactggatgcgccaagaaatctcttttggaaaattaaaacttacgaacaacaaaggagcttcaaataacaatgggcagatggtggttttacagtccttgcacaagtaccagccccgcctgcatgtggtggaagtgaacgaggacggcacggaggacactagccagcccggccgcgtgcagacgttcactttccctgagactcagttcatcgccgtcaccgcctaccagaacacggatattacacaactgaaaatagatcacaacccttttgcaaaaggatttcgggataattatgacacgatctacaccggctgtgacatggaccgcctgaccccctcgcccaacgactcgccgcgctcgcagatcgtgcccggggcccgctacgccatggccggctctttcctgcaggaccagttcgtgagcaactacgccaaggcccgcttccacccgggcgcgggcgcgggccccgggccgggtacggaccgcagcgtgccgcacaccaacgggctgctgtcgccgcagcaggccgaggacccgggcgcgccctcgccgcaacgctggtttgtgacgccggccaacaaccggctggacttcgcggcctcggcctatgacacggccacggacttcgcgggcaacgcggccacgctgctctcttacgcggcggcgggcgtgaaggcgctgccgctgcaggctgcaggctgcactggccgcccgctcggctactacgccgacccgtcgggctggggcgcccgcagtcccccgcagtactgcggcaccaagtcgggctcggtgctgccctgctggcccaacagcgccgcggccgccgcgcgcatggccggcgccaatccctacctgggcgaggaggccgagggcctggccgccgagcgctcgccgctgccgcccggcgccgccgaggacgccaagcccaaggacctgtccgattccagctggatcgagacgccctcctcgatcaagtccatcgactccagcgactcggggatttacgagcaggccaagcggaggcggatctcgccggccgacacgcccgtgtccgagagttcgtccccgctcaagagcgaggtgctggcccagcgggactgcgagaagaactgcgccaaggacattagcggctactatggcttctactcgcacagctaggccgcccctgcccgcccggccccgccgcggcccggacccccagccagcccctcacagctcttccccagctccgcctccccacactcctccttgcgcacccactcattttatttgaccctcgatggccgtctgcagcgaataagtgcaggtctccgagcgtgattttaaccttttttgcacagcagtctctgcaattagctcaccgaccttcaactttgctgtaaaccttttggttttcctacttactcttcttctgtggagttatcctcctacaattcccctccccctcgtctttctcttacctcctacttctctttcttgtaatgaaactcttcacctttaggagacctgggcagtcctgtcaggcagcagcgattccgacccgccaagtctcggcctccacattaaccataggatgttgactctagaacctggacccacccagcgcgtcctttcttatccccgagtggatggatggatggatggatggtagggatgttaataattttagtggaacaaagcctgtgaaatgattgtacatagtgttaatttattgtaacgaatggctagtttttattctcgtcaaggcacaaaaccagttcatgcttaacctttttttcctttcctttctttgcttttctttctctcctctcatactttctcttctctctcttttaattttcttgtgagataatattctaagaggctctagaaacatgaaatactcagtagtgatgggtttcccacttctcctcaatccgttgcatgaaataattactatgtgccctaatgcacacaaatagctaaggagaatccacccaaacacctttaaagg

SEQ ID NO: 1018 - DNA, 1538 bp, Homo sapiens
ccggcagggggagcgaggaggaagggaaccgcggccgggccagcggaggcggcggagcgcaccgcccaccagggctcagggtcctccgaccgggtgaagcttcgctggctgccaggatccccggcagggatgcacttcagcaccgtcaccagggacatggaagccttcacggccagcagcctgagcagcctgggggccgcggggggcttcccgggcgccgcgtcgcccggcgccgacccgtacggcccgcgcgagcccccgccgccgccgccgcgctacgacccgtgcgccgccgccgcccccggcgccccgggcccgccgccgccgccgcacgcctacccgtttgcgccggccgccggggccgccaccagcgccgccgccgagcccgagggccccggggccagctgcgcggccgcagccaaggcgccggtgaagaagaacgcgaaggtggccggtgtgagcgtgcagctagagatgaaggcgctgtgggacgagttcaaccagctgggcaccgagatgatcgtcaccaaggccggcaggcggatgtttcccaccttccaagtgaagctcttcggcatggatcccatggccgactatatgctgctcatggacttcgtgccggtggacgataagcgctaccggtacgccttccacagctcctcctggctggtggcggggaaggccgaccctgccacgccaggccgcgtgcactaccacccggactcgcctgccaagggcgcgcagtggatgaagcaaatcgtgtccttcgacaagctcaagctgaccaacaacctactggacgacaacggccacattattctgaattccatgcacagataccagccccgcttccacgtggtctatgtggacccacgcaaagatagcgagaaatatgccgaggagaacttcaaaacctttgtgttcgaggagacacgattcaccgcggtcactgcctaccagaaccatcggatcacgcagctcaagattgccagcaatcccttcgcgaaaggcttccgggactgtgaccctgaggactggccccggaaccaccggcccggcgcactgccgctcatgagcgccttcgcgcgctcgcggaaccccgtggcttccccgacgcagcccagcggcacggagaaagggctggtcacagaaggctctgggctccaacctggcttgctggacgtgctcttgaagcccccaagtaagaagtctgagtccctgagaccaccacactgcaaggacacttgaaggtactcaggtttcagagcccaagtcaggaggtcaagtgtgcatgcaagaggtggcaggggacagatgtgctgctgttcccaggccacctgcacagctggatggtggaagcagttcacttaaaggccatgagttactcgggaggctgaggcaggaggatcacttgagcctattagttggaggctgcagtaagctatgatcatgccactgcactccagcctgggtgacagagtgagacccccactgtccctggtctcttaaaagaaaaaacaaacaaacaaaccaaaaaa

SEQ ID NO: 1019 - DNA, 83 bp, Homo sapiens
aggaggcctcgcctctcccagctgggctggggctcctgtcccccactgtggtgtgcctggggcctggccaggactcccagtga

SEQ ID NO: 1020 - DNA, 3513 bp, Homo sapiens
tctttccggcttctttgcaaaaggatagaaccgtctcgaccagggcactaggactggaagatcgggctgtgtctaggccgctgtccgcgaaatccgagacgttttttcagcttggctaggaccgacttcgctgccggtttgagctttctctgcactcgggggtctcctgccgtcctcgaccggtggcgtaacttgggaagagattctgagcagagcactggttcagattctgaggtcctcactgagcggacttcctgctccttcagtactcacactgacctggcctctggtgctgcaggccctgtgcctgctgccatgtcttccatggaggagattcaggtggagctgcaatgtgctgacctctggaagcggttccatgatattggaactgaaatgatcatcaccaaagcaggcaggaggatgtttcctgccatgagagtgaaaatcactggcctagatccacatcagcagtactacatagcaatggacattgtgcctgtggacaataaaagatacagatatgtgtatcatagctccaagtggatggtggctggcaatgctgattcccctgtgcccccaagagtttatatacaccctgattctctagcttctggagacacctggatgagacaggtggtcagttttgacaaactcaagcttaccaacaatgagttggatgatcaaggacatatcattctgcactctatgcacaaataccagcctcgagttcatgtgattcgcaaagacttcagcagtgacctttcacccactaagcctgttcctgttggggatggggtgaaaacgttcaactttcctgagactgtgttcaccacagttacggcctatcagaatcagcagattaccagattaaaaattgaccgaaacccttttgctaaaggattcagagattctgggagaaacagaactggacttgaagccatcatggagacatatgcattctggagacctcctgtgcgcacactcaccttcgaagacttcaccaccatgcagaagcagcaaggaggcagcacaggcacttccccaaccacctccagcactgggacaccatccccttcggcttcttctcatcttttatctccatcctgttctcctccaacttttcatctggcccccaacactttcaatgtgggctgccgagaaagccagctgtgtaatctaaacctctctgattatccaccatgtgcccgaagcaacatggctgccttgcagagctacccagggctgagtgacagtggctacaacaggcttcagagtggcaccacttcagccactcagccctctgaaaccttcatgcctcagaggactccatccctgatctcaggaataccaactcctccctcgttgcctggcaacagcaagatggaagcctacggtggccagctggggtcctttcccacttcccagtttcagtatgtcatgcaggcaggcaatgctgcctccagctcctcatcaccacacatgttcgggggcagccacatgcagcagagctcctacaatgccttctcccttcacaacccttacaacctgtatggatacaatttccccacttcccctaggctagctgcaagcccggaaaaactgagcgcctctcaaagcactttactctgttcttctccttccaacggggcctttggagagaggcagtacctgccgtcagggatggagcacagcatgcacatgattagcccttcacccaataaccaacaggcaaccaacacttgtgatggccggcagtatggggcagttccaggctcctcctcccagatgtccgtgcacatggtttaaaggccagtccaaacaccacggagcatttggcaatcaaggccccagagtctccgtggtcagatcctcctctttgggagtccagtgtctttgaaaaacaggaaccgtgttttttttttttttttttttctggccgaagacatatacccaagaacaagagatacctttaagccagtgaaggatacttgcgatagaatcatccgcaactcagtggccattcttctgccttcccagaccttagttttataaagcattgtctgttccagagtggcctttgaagagactgaataatcacttcgtcataatgttaagggagatgctagtgtgtggcagccatgaaaagttacacatacacacccacatacagacagacctacctatacatacgtgcacacacacatacatattcatacacaattcatacacatgcaatcatacatgcacactgactctgaactgggtgaactctgtggagggaggcccagaatgggtgctttcaccaagaatttgtctgtgtacaactctagatggagtgggccagcagtagctgccagtctttctcccctgcagcttcctctgcttctggaatgaaccatgtatcctggagaccctcccaatggatgagagtggaaagacatcagtacaactggacttggcttccggaaaaagattgcttttgaactttggctctcttcacttgtatgctatcattgatattcccagtggtgcccgtggaaagagggagaaagagaagctgaacaggagaaagacaaacagaaagaatagagaacaggaacgaggtggagagcaagactgacagagaaagtgtgagcaatgatgagaattttaattcaccaaggagacgtgtttttggtttgtccccccaaaccccgcccgccccactacaggttatggaaagaatcatggcattactgaggagtaaacctctctggcacactgagcatggtcagggcattggtcagagggacagagcaaggaatgcatcctgagcccacagctttgaccactgtgatccagaagagaggtgcactacgtgggaagtgctgattccacagcatgcagcctggtaggggaaggaaaataaaagggtgtgaagaaggaatagttttataatctcggaagatgataccaagagcagaggcaacaaatagaggcctggcctccaggtgccggatccagacacctgacctagaatgcctgcccgctatccctgtggcaggaaatatcccctcatgtcccagggaattgcagatgggtcttctatacccttctacctgcccttagatctccatttttatcaaatagtacattgcattttgaagttttgggttttgtccttcatctttccctttcccttcaaatcttttaatggtaagaaagcaagtgaagcttggtgcaagctaaaatttttaaatggtgtggaaatgcaaataataccaagtaaaataatacagatattattaaagtttctggttttgaggtgttgtagataaatgtatttatgtgcctagtggggaatccaatattatgaatatgaaaaagggggcaataaaagggtatgtaaaatatgtatgaagaaaaggtgtacaaaaatttgcccttatgcacggaactctgtttctaagtgccaagcacagaaagccgctaaataaaatctttgcaattgttttcaaaaaaaaaaaaaaaaaa

SEQ ID NO: 1021 - DNA, 545 bp, Homo sapiens
ctctggaagcgctttcatgagataggcactgagatgatcatcaccaaggccggcaggcgcatgtttccagcaatgagagtgaagatctctggattagatcctcaccagcaatattacattgccatggatattgtaccagtggacaacaaaagatacaggtatgtttaccacagttcgaaatggatggtggcaggtaatgctgactcgcctgtgccaccccgtgtgtacattcatccagactcgcctgcctcgggggagacttggatgagacaagttatcagcttcgacaagctgaagctcaccaacaatgaactggatgaccaaggccatattattcttcattctatgcacaaataccaaccgcgagtgcacgtcatccgtaaagactgtggagacgatctttctcccatcaagcctgttccatccggggaaggagtaaaggcattctcctttccagaaactgtcttcacaaccgtcactgcctatcagaatcagcagattactcgcctgaagatagataggaatccatttgctaaaggcttccg

SEQ ID NO: 1022 - DNA, 2882 bp, Homo sapiens
tagaagcaggcaagttgggtaacggctctcggcaaagttcgagaagtgcctatggccatgagtgagctgggcactcggaagcccagcgatggcactgtttctcatctgctcaatgtggtggagagtgagcttcaggcagggagggaaaaaggcgaccctacggagaagcaacttcagatcatcctggaggatgcacctctctggcagagattcaaggaagtcactaatgagatgattgtgaccaagaatggcagacggatgtttccagtcctaaagattagtgtcacagggttggaccccaatgccatgtactccctcctgctggactttgtccctacggacagtcaccgctggaagtacgtcaacggggaatgggtgcccgctggcaagccagaggtctccagccacagctgcgtctacattcacccggactcccccaactttggggcccactggatgaaagctcccatctccttcagcaaagtgaagctgaccaacaagctcaatggaggcgggcagataatgttgaattctctgcataaatatgaaccccaggttcacatagtgcgtgttggaagtgcccatcgaatggtaacaaactgctccttccctgaaacccagttcatagccgtgactgcctatcagaatgaggagataacggctctcaaaatcaagtacaatccttttgccaaagccttcttggatgccaaggaaagaaatcacctaagagacgtaccggaggctatctctgagagccagcatgtgacctattctcacttgggaggctggatcttttccaatccagatggagtgtgcacagcaggaaactccaattaccagtatgccgctcctctgcctctgcctgctccccacacccaccatggctgtgagcactattcgggtctccgaggacaccggcaggctccctacccttctgcgtacatgcacagaaaccattctccctcagtgaatttgatagaaagctcaagcaataatctgcaagttttctcgggacctgacagctggacttccttatcctccacaccccatgccagcatcctgtctgtaccccacaccaacggaccaatcaatccagggcccagcccctacccgtgcctgtggaccatcagcaatggtgccggaggccccagtgggccaggcccggaggtgcacgccagcaccccaggagcatttctcctcggaaacccagctgtgacttcacccccttctgtgctctccacccaagcacccacttcggctggtgtggaggttctgggggagccctcgctaaccagcattgctgtgtccacctggacagcagtggcctcgcatcccttcgcgggctggggtggcccaggagcgggtgggcaccattctccttcctcactggatggttaagcaggatcctaggagcctctttgcacagcgatccttccatgtgtagagtgcttagaaaccccatcaactgatctagtgagtcagactgtggaatctcccttcccactagctggaggtggaggtgggttattacagaagtcatactgggagagggttcagtttggatgatgctagttagatcatttgcatctctccaccattttcttctgcactcccattttctctgcagcttattcttgccatgcttaggtgacagaagtttgttaagtaccatccttgtgccctgcctcttattctcaaatcgttctggaaagcctcacttccttttctgtggagaaggtgcaaagctgttaaatgagctcagagtttacctagctaaggccactgcttcctgctttgtgaagcctggaaagtatgtgtggccacagggctcaggttcacacttctgctttgagaccaggatggggtgtaagccatagagtaaggttaacaaaaagaataaagctaatcatgtattacaaacagcagtgtgcccagacttgtggaaatgaagtcatgtcactcctctgctcagaaaccttcaatggttcaccattaccagtggaatgaagtcaattctcctcactataactgggtgtggtagtttaagcctataatctcagcccttttggaggccaaggtaagaggatcgcttgaggtcaggagttcgagaccagcttgtgcaacaaagtgagagcctgtctctacaaaaaatagtcatgcacacaaaattagctgggcatggtggcctgtgcctatagtcccaactacttagaggaggatcgcttgatctcaggaggttgaggctgcagtgaattatgattgtggcattgcactccagcctgggtggtagatcaaggctttgtttcatttgaaaaaaaagaaagaaagaaagaaagaaagaaatcctactacgagcgatcacaccatctggcctgaaaccacttccccagcttaggtccctctgttatcctgttggcctcctatgtattggtcaaggcaggcatctctgttctctgaacattcattgcactttcccacctctataccttgcctgtgccttagtgtcctcttttttccagttcacctgtgcgaatccgacccacctcccagagcctggctgaaacgtcactccctgcatccaacatctgatctgctgagatatgtctgatctatctctgctcgctgttctcccgttgtttttgcctctgccatagagctcacctcattttgccttgtatttttgttacctgtgagtgtgtctctccctattagactgtaagcctctcgagggtgaggcctagccttcttgtctttgtaacccacagcagctggtactgtgccttgcctattgtaggtgcccaataaacatttgctgaactgaaaaaaaaaaaaaaaaaaaaaaaaaaaaaaaaaaaaaaaaaaaaaaaaaaaaaaaaaaaaaa

SEQ ID NO: 1023 - DNA, 3396 bp, Homo sapiens
cagagatcacgacaagatctaaccagtcgcgcgtggtccccggcgccggagcgggccagctcagcccggcccagcccggccccgcgcagagcccccgccgcccccgcgcacagagccgggtgccccttgcggtgcgccggacgggaagccccgaggagcagctgctgcgcccgccacccgggtcgtccgtccaccgcgcgcgccgccgcccgggccgggggtccgagccgcgcgcccccggccccggccccggcccccgggcgcctgggccggatgtcccgatgagagagccggcgctggcggccagcgccatggcttaccacccgttccacgcgccacggcccgccgacttccccatgtccgcctttctggcggcggcgcagccctccttcttcccggcactcgcgctgccgcccggcgcgctggccaagccgctgcccgacccgggcctggcgggggcggcggccgcggcggcggcggcggcagcagcggccgaggcggggctgcacgtctcggcactgggcccgcacccgcccgccgcgcatctgcgctccctcaagagcctggagcccgaggacgaggtggaggacgaccccaaggtgacgctggaggccaaggagctgtgggaccagttccacaagctaggcacggagatggtcatcaccaagtccgggaggcggatgttcccccccttcaaggtgcgagtcagcggcctggacaagaaggccaagtatatcctgctgatggacattgtagccgctgacgattgccgctataagttccacaactcgcgctggatggtggcgggcaaggccgaccctgagatgcccaaacgcatgtacatccacccagacagcccagccacgggggagcagtggatggctaagcctgtggccttccacaagctgaagctgaccaacaacatctctgacaagcacggcttcaccatcctaaactccatgcacaagtaccagccgcgcttccacatagtgcgagccaacgacatcctgaagctgccttacagcaccttccgcacctacgtgttcccggagaccgacttcatcgccgtcactgcctaccagaatgacaagatcacacagctgaagatcgacaacaacccgtttgccaagggcttccgggacaccgggaacggccggcgggagaaaaggaagcagctgacgctgccgtctctacgcttgtacgaggagcactgcaaacccgagcgcgatggcgcggagtcagacgcctcgtcgtgcgaccctccccccgcgcgggaaccacccacctccccgggcgcagcgcccagtccgctgcgcctgcaccgggcccgagctgaggagaagtcgtgcgccgcggacagcgacccggagcctgagcggttgagcgaggagcgtgcgggggcgccgctaggccgcagcccggctccagacagcgccagccccactcgcttgaccgaacccgagcgcgcccgggagcggcgtagtcccgagaggggcaaggagccggccgagagcggcggggacggcccgttcggcctgaggagcctggagaaggagcgcgccgaagctcggaggaaggacgaggggcgcaaggaggcggccgagggcaaggagcagggcctggcgccgctggtggtgcagacagacagtgcgtcccccctgggcgccggacacctgcccggcctggccttttccagccacttgcacgggcagcagttctttgggccgctgggagccggccagccgctcttcctgcaccctggacagttcaccatgggccctggcgccttctccgccatgggcatgggtcacctactggcctcggtggcaggcggcggcaacggcggaggtggcgggcctgggaccgccgcggggctggacgcaggcgggctgggtcccgcggccagcgcagcaagcaccgccgcgcccttcccgttccacctctcccagcacatgctggcatctcagggaattccaatgcccactttcggaggcctcttcccctacccctacacctacatggcagcagcagccgcagccgcctcggctttgcccgccactagtgctgcagctgccgccgccgcagccgccggctccctctcccggagccccttcctgggcagtgcccggccccgactgcgtttcagcccctatcagatcccggtcaccatcccgcctagcactagcctcctcaccaccgggctggcctctgagggctccaaggccgctggtggaaacagccgggagcctagccccctgcccgagctggctctccgcaaagtaggggccccatcccgcggtgccctgtcgcccagtggctcggccaaggaggcggccaatgaactgcagagcatccagagactggtgagtgggctggagagccagcgagccctctccccaggccgggagtcgcccaagtgaggggctgcccagctgctcccctgccacgcaggccacccgggctgcctgcccctgctgcttgggacgtgtacagcacagaatgagtatttatttaaataaaggagaaaagtgggctgcagcagccggaatagagcctcgtctggcaagtcggggcctgggacacttccctgggcctcaacaaggatcaggctgctggaaacacagtcacttgggagctgctgggctaggtccagatccgctccagcgtcaaggtggcatccgaaggtgtctctggtcttccagcgaggtgggagaggcctcatccagggcccagcggtccctgcagaagccagaaggtgcaggggccaggggtgggagcatcggagggagtcccagagccctggaccttgggcctagaccgcgtgataaaactgggttgagggatgctggaaccagttacgactgaagtcagtgtagacctgagctgggagggaacctgttagtctccccacctcttccctgaagagacaggcacccctcccagccgtggtcaacggagggagtggcacttctgccttgagtccccaggggaaaaaaaaaaaagatatttatgaaataaatggtaatttgtgtaaataagctttaaggttcccagaatatgcaaattggtattaatttattcaaaggtgtacattgctgtgtacatatatttagagattaactcatacatttaaagtttttttcattttacgtgagcatctatattgtacagggctgggggggcccttggctgcgggagaaggcccagagccctggaggagccaccaccccgccggcccctcgacccctcggcccctcggcccctccgcccgggtttggctcgcccggcccgcgggctccacctcaggttttcacttttcgctccggagcgagaacgaaacgacaaaaacgcaagaaaacaataaaacgctagaaagcgaaaaaaaaaaaaaaaaaa

SEQ ID NO: 1024 - DNA, 602 bp, Homo sapiens
atggccaaaattgcctgcagcctggagaccaaggagctttgggacaaattccatgagctgggcaccgagatgatcatcaccaagtcgggcaggaggatgtttccaaccatccgggtgtccttttcgggggtggatcctgaggccaagtacatagtcctgatggacatcgtccctgtggacaacaagaggtaccgctacgcctaccaccggtcctcctggctggtggctggcaaggccgacccgccgttgccagccaggctctatgtgcatccagattctccttttaccggtgagcaactactcaaacagatggtgtcttttgaaaaggtgaaactcaccaacaatgaactggatcaacatggccatataattttgaactcaatgcataagtaccagccaagggtgcacatcattaagaagaaagaccacacagcctcattgctcaacctgaagtctgaagaatttagaactttcatctttccagaaacagtttttacggcagtcactgcctaccagaatcaactgataacgaagctgaaaatagatagcaatccttttgccaaaggattccgggattcctccaggctcactgacattgagag

SEQ ID NO: 1025 - DNA, 2589 bp, Homo sapiens
cggcccgctggagaggaagcccgagagctgccgcgcgcctgccggacgagggcgtagaagccaggcgtcagagcccgggctccggtggggtcccccacccggccctcgggtcccccgccccctgctccctgcccatcccagcccacgcgaccctctcgcgcgcggaggggcgggtcctcgacggctacgggaaggtgccagcccgccccggatgggcatcgtggagccgggttgcggagacatgctgacgggcaccgagccgatgccggggagcgacgagggccgggcgcctggcgccgacccgcagcaccgctacttctacccggagccgggcgcgcaggacgcggacgagcgtcgcgggggcggcagcctggggtctccctacccggggggcgccttggtgcccgccccgccgagccgcttccttggagcctacgcctacccgccgcgaccccaggcggccggcttccccggcgcgggcgagtccttcccgccgcccgcggacgccgagggctaccagccgggcgagggctacgccgccccggacccgcgcgccgggctctacccggggccgcgtgaggactacgcgctacccgcgggactggaggtgtcggggaaactgagggtcgcgctcaacaaccacctgttgtggtccaagtttaatcagcaccagacagagatgatcatcaccaagcagggacggcggatgttcccattcctgtcatttactgtggccgggctggagcccaccagccactacaggatgtttgtggacgtggtcttggtggaccagcaccactggcggtaccagagcggcaagtgggtgcagtgtggaaaggccgagggcagcatgccaggaaaccgcctgtacgtccacccggactcccccaacacaggagcgcactggatgcgccaggaagtttcatttgggaaactaaagctcacaaacaacaagggggcgtccaacaatgtgacccagatgattgtgctccagtccctccataagtaccagccccggctgcatatcgttgaggtgaacgacggagagccagaggcagcctgcaacgcttccaacacgcatatctttactttccaagaaacccagttcattgccgtgactgcctaccagaatgccgagattactcagctgaaaattgataataacccctttgccaaaggattccgggagaactttgagtccatgtacacatctgttgacaccagcatcccctccccgcctggacccaactgtcaattccttgggggagatcactactctcctctcctacccaaccagtatcctgttcccagccgcttctaccccgaccttcctggccaggcgaaggatgtggttccccaggcttactggctgggggccccccgggaccacagctatgaggctgagtttcgagcagtcagcatgaagcctgcattcttgccctctgcccctgggcccaccatgtcctactaccgaggccaggaggtcctggcacctggagctggctggcctgtggcaccccagtaccctcccaagatgggcccggccagctggttccgccctatgcggactctgcccatggaacccggccctggaggctcagagggacggggaccagaggaccagggtccccccttggtgtggactgagattgcccccatccggccggaatccagtgattcaggactgggcgaaggagactctaagaggaggcgcgtgtccccctatccttccagtggtgacagctcctcccctgctggggccccttctccttttgataaggaagctgaaggacagttttataactattttcccaactgagcagatgacatgatgaaaggaacagaaacagtgttattaggttggaggacaccgactaatttgggaaacggatgaaggactgagaaggcccccgctccctctggcccttctctgtttagtagttggttggggaagtggggctcaagaaggattttggggttcaccagatgcttcctggcccacgatgaaacctgagaggggtgtccccttgccccatcctctgccctaactacagtcgtttacctggtgctgcgtcttgcttttggtttccagctggagaaaagaagacaagaaagtcttgggcatgaaggagctttttgcatctagtgggtgggaggggtcaggtgtgggacatgggagcaggagactccactttcttcctttgtacagtaactttcaaccttttcgttggcatgtgtgttaatccctgatccaaaaagaacaaatacacgtatgttataaccatcagcccgccagggtcagggaaaggactcacctgactttggacagctggcctgggctccccctgctcaaacacagtggggatcagagaaaaggggctggaaaggggggaatggcccacatctcaagaagcaagatattgtttgtggtggttgtgtgtgggtgtgtgttttttctttttctttctttttattttttttgaatgggggaggctatttattgtactgagagtggtgtctggatatattccttttgtcttcatcactttctgaaaataaacataaaactgttaaaaaaaaaaaaaaaaa

SEQ ID NO: 1026 - DNA, 2248 bp, Homo sapiens
caaagaatcccttcaccccctccagggatggctctgagctctcgggcgcgtgccttctccgtggaagccttggtggggagacccagcaaaagaaaactccaagacccaatacaggcggagcagcctgagctgcgggagaaaaagggcggagaggaagaggaggagagaaggagcagcgctgcagggaagagcgagccgcttgaaaaacaacctaagacagagccctcaacatctgcttcctctggctgcggcagcgacagcggctacggcaacagctctgaaagtctggaagagaaagatattcaaatggagcttcaaggatctgaactgtggaaaagattccatgacatcgggactgagatgatcattactaaagcgggcaggcggatgttcccctctgttcgggtcaaggtgaaagggttggatccagggaagcagtaccatgtggccatcgatgtggtgccggtggattccaaacgctataggtacgtctatcacagctcacagtggatggtagctgggaatacagaccatttgtgcatcattcctagattctatgttcacccggactcaccctgctcgggagagacctggatgcggcagatcatcagctttgatcgcatgaaactcaccaacaatgagatggatgacaaaggccacatcattctgcaatccatgcataagtacaaaccccgagtgcacgtgatagagcaaggcagcagtgttgacctgtcccagattcagtccttgcccactgaaggtgttaaaacattctcctttaaagaaactgagttcaccacagtaacggcttaccaaaaccaacagattacgaaactaaaaatagaaagaaatccttttgctaaaggatttagagatactggaagaaacaggggtgtattggatgggcttttagagacctacccatggaggccttctttcactctcgattttaaaacctttggcgcagacacacaaagtggaagcagtggctcatctccagtgacctctagtggaggggccccctctcctttgaactccttactttctccactttgcttttcacctatgtttcatttacctacaagctcccttggaatgccctgtccagaggcatacctgcccaatgtcaacctgcctctatgctacaagatttgtccaactaatttttggcaacagcaacctcttgttttaccggctcctgaaagactagcaagcagcaacagttctcagtctttagccccactcatgatggaagtgcctatgttatcttccctgggggtcaccaattcaaaaagcggttcatctgaagactccagtgatcagtatctacaagcacctaattctaccaatcaaatgttatatggattacagtcacctggaaatatttttctgccaaactccatcaccccagaagcacttagttgctcctttcatccttcctatgacttttatagatacaatttctctatgccatctagactgataagtggttccaaccatcttaaagtgaatgacgacagtcaagtttcttttggagaaggcaaatgtaatcatgttcattggtatccagcaattaaccattacctttagtaagacaatagcatttctagaacaattacatgtaaacaaatattttctttatttgtagccaaagaaatttcaacagttattgggcttaaaaagcatcattacaatacagtatttctttgttatacatttaaagatttaaagtgccttatcaaataatattcatgaagagttgtttataatgtcaaatgaaacctacaggaatctctgattacagtggccttgagcttcaaaatgagatatgcaataaatattatttgatgatactccaccagtgaaaattgatgctaagtgatgggattttcaattatactgaagctagttcaccacgttaactgcattttacacattgacaatgacaaaaagaagatggatgtaattctcatgaaagcagtgaagcaatttcagttttaaaaatgaagatcggctttcatgtaattatctagtagttgtagaagaaaatttaattatttgtttgcctcatgcctttatactttgctgttgaagaaactactaatctcaatttaagatacaaataaggacacaaactttcaagtattatattttatttatctttgtagcctaaagaccatttaatcttgaaggaacacaaagatcaaatgaaaagtaaaacactctaaataaatttgcttttattttc

SEQ ID NO: 1027 - DNA, 4754 bp, Homo sapiens
gaattctagaggcggcggagggtggcgaggagctctcgctttctctcgctccctccctctccgactccgtctctctctctctctctctctctcccctccctctctttccctctgttccattttttccccctctaaatcctccctgccctgcgcgcctggacacagatttaggaagcgaattcgctcacgttttaggacaaggaagagagagaggcacgggagaagagcccagcaagatttggattgaaaccgagacaccctccggaggctcggagcagaggaaggaggaggagggcggcgaacggaagccagtttgcaattcaagttttgatagcgctggtagaagggggtttaaatcagatttttttttttttaaaggagagagactttttccgctctctcgctccctgttaaagccgggtctagcacagctgcagacgccaccagcgagaaagagggagaggaagacagatagggggcgggggaagaagaaaaagaaaggtaaaaagtcttctaggagaacctttcacatttgcaacaaaagacctaggggctggagagagattcctgggacgcagggctggagtgtctatttcgagctcagcggcagggctcgggcgcgagtcgagaccctgctcgctcctctcgcttctgaaaccgacgttcaggagcggctttttaaaaacgcaaggcacaaggacggtcacccgcgcgactatgtttgctgatttttcgccttgccctctttaaaagcggcctcccattctccaaaagacacttcccctcctccctttgaagtgcattagttgtgatttctgcctccttttcttttttctttcttttttgttttgctttttccccccttttgaattatgtgctgctgttaaacaacaacaaaaaaacaacaaaacacagcagctgcggacttgtccccggctggagcccagcgccccgcctggagtggatgagcctctccatgagagatccggtcattcctgggacaagcatggcctaccatccgttcctacctcaccgggcgccggacttcgccatgagcgcggtgctgggtcaccagccgccgttcttccccgcgctgacgctgcctcccaacggcgcggcggcgctctcgctgccgggcgccctggccaagccgatcatggatcaattggtgggggcggccgagaccggcatcccgttctcctccctggggccccaggcgcatctgaggcctttgaagaccatggagcccgaagaagaggtggaggacgaccccaaggtgcacctggaggctaaagaactttgggatcagtttcacaagcggggcaccgagatggtcattaccaagtcgggaaggcgaatgtttcctccatttaaagtgagatgttctgggctggataaaaaagccaaatacattttattgatggacattatagctgctgatgactgtcgttataaatttcacaattctcggtggatggtggctggtaaggccgaccccgaaatgccaaagaggatgtacattcacccggacagccccgctactggggaacagtggatgtccaaagtcgtcactttccacaaactgaaactcaccaacaacatttcagacaaacatggatttactatattgaactccatgcacaaataccagccccggttccacattgtaagagccaatgacatcttgaaactcccttatagtacatttcggacatacttgttccccgaaactgaattcatcgctgtgactgcataccagaatgataagataacccagttaaaaatagacaacaacccttttgcaaaaggtttccgggacactggaaatggccgaagagaaaaaagaaaacagctcaccctgcagtccatgagggtgtttgatgaaagacacaaaaaggagaatgggacctctgatgagtcctccagtgaacaagcagctttcaactgcttcgcccaggcttcttctccagccgcctccactgtagggacatcgaacctcaaagatttatgtcccagcgagggtgagagcgacgccgaggccgagagcaaagaggagcatggccccgaggcctgcgacgcggccaagatctccaccaccacgtcggaggagccctgccgtgacaagggcagccccgcggtcaaggctcaccttttcgctgctgagcggccccgggacagcgggcggctggacaaagcgtcgcccgactcacgccatagccccgccaccatctcgtccagcactcgcggcctgggcgcggaggagcgcaggagcccggttcgcgagggcacagcgccggccaaggtggaagaggcgcgcgcgctcccgggcaaggaggccttcgcgccgctcacggtgcagacggacgcggccgccgcgcacctggcccagggccccctgcctggcctcggcttcgccccgggcctggcgggccaacagttcttcaacgggcacccgctcttcctgcaccccagccagtttgccatggggggcgccttctccagcatggcggccgctggcatgggtcccctcctggccacggtttctggggcctccaccggtgtctcgggcctggattccacggccatggcctctgccgctgcggcgcagggactgtccggggcgtccgcggccaccctgcccttccacctccagcagcacgtcctggcctctcagggcctggccatgtcccctttcggaagcctgttcccttacccctacacgtacatggccgcagcggcggccgcctcctctgcggcagcctccagctcggtgcaccgccaccccttcctcaatctgaacaccatgcgcccgcggctgcgctacagcccctactccatcccggtgccggtcccggacggcagcagtctgctcaccaccgccctgccctccatggcggcggccgcggggcccctggacggcaaagtcgccgccctggccgccagcccggcctcggtggcagtggactcgggctctgaactcaacagccgctcctccacgctctcctccagctccatgtccttgtcgcccaaactctgcgcggagaaagaggcggccaccagcgaactgcagagcatccagcggttggttagcggcttggaagccaagccggacaggtcccgcagcgcgtccccgtagacccgtcccagacacgtcttttcattccagtccagttcaggctgccgtgcactttgtcggatataaaataaaccacgggcccgccatggcgttagcccttccttttgcagttgcgtctgggaaggggccccggactccctcgagagaatgtgctagagacagcccctgtcttcttggcgtggtttatatgtccgggatctggatcagattctgggggctcagaaacgtcggttgcattgagctactgggggtaggagttccaacatttatgtccagagcaacttccagcaaggctggtctgggtctctgcccaccaggcggggaggtgttcaaagacatctccctcagtgcggatttatatatatatttttccttcactgtgtcaagtggaaacaaaaacaaaatctttcaaaaaaaaaatcgggacaagtgaacacattaacatgattctgtttgtgcagattaaaaactttatagggacttgcattatcggttctcaataaattactgagcagctttgtttggggagggaagtccctaccatccttgtttagtctatattaagaaaatctgtgtctttttaatattcttgtgatgttttcagagccgctgtaggtctcttcttgcatgtccacagtaatgtatttgtggtttttattttgaacgcttgcttttagagagaaaacaatatagccccctacccttttcccaatcctttgccctcaaatcagtgacccaagggagggggggatttaaagggaaggagtgggcaaaacacataaaatgaatttattatatctaagctctgtagcaggattcatgtcgttctttgacagttctttctctttcctgtatatgcaataacaaggttttaaaaaaataataaagaagtgagactattagacaaagtatttatgtaattatttgataactcttgtaaataggtggaatatgaatgcttggaaaattaaactttaatttattgacattgtacatagctctgtgtaaatagaattgcaactgtcaggttttgtgttcttgttttcctttagttgggtttatttccaggtcacagaattgctgttaacactagaaaacacacttcctgcaccaacaccaataccctttcaaaagagttgtctgcaacatttttgttttcttttttaatgtccaaaagtgggggaaagtgctatttcctattttcaccaaaattggggaaggagtgccactttccagctccacttcaaattccttaaaatataactgagattgctgtggggagggaggagggcagaggctgcggtttgactttttaatttttcttttgttatttgtatttgctagtctctgatttcctcaaaacgaagtggaatttactactgttgtcagtatcggtgttttgaattggtgcctgcctatagagatatattcacagttcaaaagtcaggtgctgagagatggtttaaagacaaattcatgaaggtatattttgtgttatagttgttgatgagttctttggttttctgtatttttccccctctctttaaaacatcactgaaatttcaataaatttttattgaaatgtctaaaaaaaaaaaaaaaaaaaaaaaaaaaaaaa

SEQ ID NO: 1028 - DNA, 2470 bp, Homo sapiens
tgtggacctgggcgagtgactcgttgtgtgctgtgcccgcaggagatgctgcaggataagggcctgtccgagagcgaggaggccttccgggccccgggcccagcgctcggagaggccagcgcagccaacgcccccgagcccgcgctggcagcgccgggcctcagcggagccgcgctaggcagccccccgggacccggggccgacgtcgtcgccgccgccgccgcggagcagaccatcgagaacatcaaggtggggctgcatgagaaggagctctggaagaagttccacgaggcgggcaccgagatgatcatcactaaggctggcaggaggatgttccccagctacaaggtaaaagtcacaggcatgaaccccaagaccaagtatatcctgctgattgacattgtccctgccgatgaccatcgctacaagttctgtgacaacaaatggatggtggcagggaaggctgagccagccatgccaggaaggctgtatgtccacccggattctcctgccacaggagcccactggatgcggcagctggtctccttccagaagctgaagctgacaaacaaccacctggacccctttggccatatcatcctcaactctatgcacaagtaccagccgcggctccacatcgttaaggctgatgagaacaatgctttcggctccaaaaacactgctttctgcacccacgtgttcccagagacctccttcatctctgtgacctcctaccagaatcacaagatcacccagctgaaaattgagaacaacccttttgccaagggattccggggcagtgatgacagtgacctgcgtgtggcccgactgcagagcaaagaataccccgtgatttccaaaagcatcatgaggcagaggctcatctccccccagctctcagccacaccggacgtgggccccctgctcggcacccaccaggcactccagcactaccagcacgagaacggggcacactcacagctcgcggagccgcaggacctgcccctcagcacctttcccacccagagggactcaagcctcttctatcactgcctgaaaagacgagacggtacccgccacctggacttaccttgcaagcgatcctatctggaagccccctcttcggtgggggaggatcactatttccgttccccccctccctacgaccagcaaatgctgagcccctcctactgcagtgaggtgacccccagagaagcatgtatgtactcaggttcagggcccgagattgccggggtgtctggggtggacgacctgcccccacctccgctgagctgtaacatgtggacttcagtgtcgccgtacaccagctatagcgtgcagacgatggagactgtgccgtaccagcccttccccacgcacttcaccgccaccaccatgatgccgcggctgcccaccctctccgctcagagctcccagccaccaggaaatgcccactttagtgtctacaatcagctctcccagtctcaggtccgagagcgggggcccagcgcctcattcccaagagagcgcggcctcccccaagggtgtgagaggaagccaccctcgccacatctaaatgctgccaatgagtttctctactctcaaaccttctccttgtcccgagaatcttccttacagtaccattcaggaatggggactgtggagaactggactgacggatgactctcacgtctcctccatagccccgggaccgtgttgctccagtattaacctctgtgggtggcctgcactctaccaagaaacacaggaaggtattccagtgtgtgtgtgtgtgtgtgtgtgtgtgtgtgtgtgtgtgtatacacgagcatgtatgtatttggagagcatccatcttctgacatacaactgaggtcatgacaaggaaaaaaaacaccacatttatctaagaagtgattttggctgcaggacctgggtctattgttatctgacatctcttgacatgcccgtgggtgggatgggagtggagggttcatatgagttattgagagggttttataatggttgatttactcaggggccaggtggggagttctctcccatggggaaagattctcactgctggggtgggaagattctcgctgctggggtgtgaggactctgtgcacaccttagagttcctggccttctctttgcaaggggagctgagaatctggttttggtagcaggaggcccactcctttgacttctggagagtctgtgagactgcctgagaggtgggctcagctaagccacaatgtgtactttgatagtacagctggctgctcagtgagtggcctagacattgatgactggagctctgaggtctgagggatgacgttcggaaagggtcatgggctaaatgtcacctgaggggtatttttaaagggtttttttttcccttcaagaggagggaaaatgcaaccagtagcatctctgtcatcattcagattttgtaataaagtacaga

SEQ ID NO: 1029 - DNA, 3921 bp, Homo sapiens
catgccttatgcaagagacctcagtcccccggaacaactcgatttccttccaatagaggtctgaggtggactcccacctcccttcgtgaagagttccctcctctcccccttcctaagaaagtcgatcttggctctatttgtgtcttatgttcatcaccctcattcctccggagaaagccgggttggtttatgtctttatttattcccggggccaagacgtccggaacctgtggctgcgcagacccggcactgataggcgaagacggagagaaatttacctcccgccgctgccccccagccaaacgtgacagcgcgcgggccggttgcgtgactcgtgacgtctccaagtcctataggtgcagcggctggtgagatagtcgctatcgcctggttgcctctttattttactggggtatgcctggtaataaacagtaatatttaatttgtcggagaccacaaaccaaccttgagctgggaggtacgtgctcttcttgacagacgttggaagaagacctggcctaaagaggtctcttttggtggtccttttcaaagtcttcacctgagccctgctctccagcgaggcgcactcctggcttttgcgctccaaagaagaggtgggatagttggagagcagaaccttgcgcgggcacagggccctgggcgcaccatggccgacgcagacgagggctttggcctggcgcacacgcctctggagcctgacgcaaaagacctgccctgcgattcgaaacccgagagcgcgctcggggcccccagcaagtccccgtcgtccccgcaggccgccttcacccagcagggcatggagggaatcaaagtgtttctccatgaaagagaactgtggctaaaattccacgaagtgggcacggaaatgatcataaccaaggctggaaggcggatgtttcccagttacaaagtgaaggtgacgggccttaatcccaaaacgaagtacattcttctcatggacattgtacctgccgacgatcacagatacaaattcgcagataataaatggtctgtgacgggcaaagctgagcccgccatgcctggccgcctgtacgtgcacccagactcccccgccaccggggcgcattggatgaggcagctcgtctccttccagaaactcaagctcaccaacaaccacctggacccatttgggcatattattctaaattccatgcacaaataccagcctagattacacatcgtgaaagcggatgaaaataatggatttggctcaaaaaatacagcgttctgcactcacgtctttcctgagactgcgtttatagcagtgacttcctaccagaaccacaagatcacgcaattaaagattgagaataatccctttgccaaaggatttcggggcagtgatgacatggagctgcacagaatgtcaagaatgcaaagtaaagaatatcccgtggtccccaggagcaccgtgaggcaaaaagtggcctccaaccacagtcctttcagcagcgagtctcgagctctctccacctcatccaatttggggtcccaataccagtgtgagaatggtgtttccggcccctcccaggacctcctgcctccacccaacccatacccactgccccaggagcatagccaaatttaccattgtaccaagaggaaagaggaagaatgttccaccacagaccatccctataagaagccctacatggagacatcacccagtgaagaagattccttctaccgctctagctatccacagcagcagggcctgggtgcctcctacaggacagagtcggcacagcggcaagcttgcatgtatgccagctctgcgccccccagcgagcctgtgcccagcctagaggacatcagctgcaacacgtggccaagcatgccttcctacagcagctgcaccgtcaccaccgtgcagcccatggacaggctaccctaccagcacttctccgctcacttcacctcggggcccctggtccctcggctggctggcatggccaaccatggctccccacagctgggagagggaatgttccagcaccagacctccgtggcccaccagcctgtggtcaggcagtgtgggcctcagactggcctgcagtcccctggcacccttcagccccctgagttcctctactctcatggcgtgccaaggactctatcccctcatcagtaccactctgtgcacggagttggcatggtgccagagtggagcgacaatagctaaagtgaggcctgcttcacaacagacatttcctagagaaagagagagagagaggagaaagagagagaaggagagagacagtagccaagagaaccccacggacaagatttttcatttcacccaatgttcacatctgcactcaaggtcgctggatgctgatctaatcagtagcttgaaaccacaattttaaaaatgtgactttcttgttttgtctcaaaacttaaaaaaacaaacacaaaaagatgagtcccaccccccactaccaccacacccatcaaccagccacattcacgctactccccagatctcttcccccattccttcttttgggctctagaaagtcttgcctcattgagtgtttttccctagtgcgtagttggagtctgtccctgtcttggtgttaatgttgacattgttatataataaatgataatatatttttttctttcaattttcttaatgggacccagtcccttatttggggggaggtctgaggcaagtatatttcaaaatatgtacttgcgggattcccttcaagtaaaccatccctgaaacctaaattcacgtttccccttgactaagaaaagcacctacctctgccatgtgatgtttctgaaaagcctctgtatgtccccatttgctttggttttgtcctgccttctccaatatcacgtgctcagttttgcctctacttacccatggagtcaggataacactgacgctccctggcatcctatcttattcagccctaccatcttgccagctctgtctttccagctgtctgtcgctaaaacgtggcctatagcttcccttccggaaagcttgctttgaaaaacttaaaaagcccccgtttacatgtaggcaggactgtgataacagtgcaagctctgtgttgacaagagttgtggacaaaaagccaaaataaatattcttcctgattaaaaaaattttttttgaaaaaaacaaggccagccccaaccttccaaacctccatcaccaacaacccaaactggatgtcaagcaaaatgcacaattcctacagaagaggcaagacacagtcaccaatgatatctcgccaaagaaaccacgcccacaccaatgccaacacaaaactgtgtttactgaaagccgaaaacagtattaaaaaaagtgtgtaagtaaagtgttatggtagggttcttcagatgtaatattttactggtactatttatttataaataggaattctaattaagtaataacatgaaatgaaacccagcataggagctggccaagagcttttaattttattgatactcaaaaccaagtttgtgtttttttgtttttttttgtttttttcctctttcgaatgtgctttgctttttttgattaaaaagaattttttttttccttttttataaacagaccctaataaagagaacagggtaagatgtgaggctgagtgtgtttaagtacgtgagagagtgtgagtgtgtttgtaagtgagtgtccctatgcgattatgtctctttacgttgctaaggggggagggtgaggattaagtactcgtgccttatatttgtgtgccaattaatgcctaataaataccatgtgcttaaacaagtaaaaaaaaaaaaaaaaaaaaaaaaaaaaaaaaaaaaaaaaaaaaaaaaaaaaaaaaaaaaaaaaaaaaaaaaaaaaaaaaaaaaaaaaaaaaaaaa

SEQ ID NO: 1030 - DNA, 1830 bp, Homo sapiens
agctgtcggactcaccgggggccctaagcagcgagacctgaggccagacggaactacaacatgtaccatccacgagaattgtacccgtccctgggggccggctaccgcctggggcccgcccaacctggggccgactccagcttcccacccgccctagcggagggctaccgctaccccgaactggacacccctaaactggattgcttcctctccgggatggaggctgctccccgcaccctggccgcgcacccacctctgccccttctgccccctgccatgggcactgagccggccccatcagctccagaggccctccattccctcccgggggtcagcctgagcctggagaaccgggagctatggaaggagttcagctctgtgggaacagaaatgatcatcaccaaagctgggaggcgcatgttccctgcctgccgagtgtcagtcactggcctggaccccgaggcccgctacttgtttcttctggatgtgattccggtggatggggctcgctaccgctggcagggccggcgctgggagcccagcggcaaggcagagccccgcctgcctgaccgtgtctacattcaccccgactctcctgccactggtgcacattggatgcggcagcctgtgtctttccatcgtgtcaagctcaccaacagcacgctggacccccacggccacctgatcctgcactccatgcacaagtaccaaccccgcatacacctagttcgggcagcccagctctgcagccagcactgggggggcatggcctccttccgcttccccgagaccacattcatctccgtgacagcctaccagaacccacagatcacacaactgaagattgcagccaatccctttgccaaaggcttccgggagaacggcagaaactgtaagagggagcgagacgcccgtgtgaagaggaaactgcggggcccagagccagcagccacagaggcctatgggagcggagacacaccaggtggtccctgcgactccaccctgggtggagacattcgtgaatcagatccagaacaggccccagcccccggggaagccaccgctgccccggcacctctgtgtggtggccccagtgctgaggcctacctcctgcaccctgcggctttccatggggcccccagtcaccttcccaccaggagccccagcttcccggaggctccagactccgggcgctcagccccctactcggctgcatttctggagctgccgcacgggtcagggggctccgggtacccagcggctccaccggcggtaccctttgccccgcactttctccaagggggccccttccctctaccatacaccgcgcctgggggctatctggatgtgggctccaaacccatgtactgaaccactgctgggcccctctgcctccatcacaaacctcccgctcccttcccccagccctggagccccctcacctccaccggccccatcccccacaccaaatggccgccttgggcctgcccacccaccccctcaacttcacaccttgatttcactcccacccccctctggcttcaaagcctaaccaaggctgctgggagtccagctggggccggcttccccttcccggctctcacctccgtgtgaatggaaggggctctgcctggccaaatggggccacagaccagcatccccacttaccaggcctccccatgggctctggaggggctcaatccccacccccccacacacactggtgcaggccacaccagtctgttgttctgggaccagagtatttttgttaataaaactcaaaagccatccatgctcaggaaaaaaaaaaaaaaaaaaaaaaaaaaaaaa

SEQ ID NO: 1031 - DNA, 1220 bp, Homo sapiens
tcttttttttgcctgtccaccatctccctattaccctttggtcgagagggaaagcagaagaagtctgctggtcacagcggggcacctcgaggagaggacgactaggagcacacggcccggaaaggtccaggtcagggaagggaataactgtgcttgaagaagaaaattcccaacatggacaaaccacgcaaagaaaatgaagaagagccgcagagcgcgcccaagaccgatgaggagaggcctccggtggagcactctcccgaaaagcagtcccccgaggagcagtcttcggaggagcagtcctcggaggaggagttctttcctgaggagctcttgcctgagctcctgcctgagatgctcctctcggaggagcgccctccgcaggagggtctttccaggaaggacctgtttgaggggcgccctcccatggagcagcctccttgtggagtaggaaaacataagcttgaagaaggaagctttaaagaaaggttggctcgttctcgcccgcaatttagaggggacatacatggcagaaatttaagcaatgaggagatgatacaggcagcagatgagctagaagagatgaaaagagtaagaaacaaactgatgataatgcactggaaggcaaaacggagccgtccttatcctatttaatgtgttcggcctttaattctgttttgcctgctaatagtattgccattgccacctggactttctgtttgcattttcttaatgccttttcccatattctgaattttaactttttgtgaggctttattttagatgtttagcatgtaactcgcttaaagttgaggtttccccctaaaatctacaagtttccctctttcagtcatgagccctacacatttgcatgaaagatgtacattatatattgtgaaacgaaaaaagcaattttcaaatggtatatattgtatcccatttttgtaaaaaaaatgtatatttatatattaatatgcaaagaaaaagctaaaagtatagacttcaaaggcataacagtggttgtgtggtaagataataggtgattttttaaatttttgttttatctgaatttctcattttttcaggacaaacgttttacttgtgttgcaaaaatatataatgaaaaaatcacacaattttgaagaaaactgtcaatcagcttataacgacaatgtggcacttaataaatacttgtcagaactttaaaaaaaaaaaaaaaa

SEQ ID NO: 1032 - DNA, 4233 bp, Homo sapiens
agacgtcgggtcggcgggtggatgaacgcggccctctgtaatggcggagcgtggcggggacgggggcgagagtgaacgattcaacccgggggagctcaggatggcccaacagcaggccttgaggttccgaggtccggctcccccaccaaatgcagtgatgcgaggcccaccacctctgatgcgacctcctccaccttttggtatgatgcgaggccctcctccaccaccacggccgccctttggacgtcctccttttgatcctaatatgccgccaatgcctcctccaggagggatacctccacctatgggccctccacacctccagagaccacctttcatgcctcctcccatgagttccatgcctcctcctccgggtatgatgtttccaccaggaatgcctcctgtgactgctcctggtactccagcactacctcctacggaggagatatgggttgaaaataaaactccagatgggaaggtttattattataatgctcggacacgtgaatctgcatggaccaagccagatggagttaaggttattcagcaatcagaactgacacctatgcttgcagcccaggcacaggttcaggctcaggcccaggcgcaggctcaggcccaggcgcaggctcaggcccaggcacaagctcaggcccaggctcaggctcaggcccaggcccaggcccaggcccaggcccaggcccaagcccaagcccaggcccaggctcaggctcaggcacaagctcaggcccaggcccaggctcaggtccaggcccaggtccaggcacaagtgcaagcacaagcagttggagcttccacccctacgaccagtagcccagcacctgcagtatccacttcaacatcatcatccaccccttcctctaccacttctaccacaacaactgctacttcagttgcgcagacagtatcaacacccacaacacaagatcagaccccaagttctgctgtttcagttgccacgcctacagttagtgtttcaactcctgctcctacagccacacctgtgcaaaccgttccccagccgcaccctcagacgttacctcctgctgttcctcattcagtacctcagccaacaacagcaatacctgcttttccaccagtaatggtacctccgtttcgtgttccccttcctggcatgccaattccacttccaggtgtagcaatgatgcaaatagtcagctgcccgtatgtaaagacagtcgctaccaccaagaccggtgtattgccaggaatggcccctcctatcgtacccatgatacatccccaggttgctattgcagcttcacctgctaccttagctggagcaacagcagtttctgaatggactgaatataaaacagcagatgggaagacatattattataataatagaacattagaatcaacctgggaaaaaccccaagaactaaaggaaaaagaaaagttagaagagaagattaaagagccaattaaagaaccctctgaagagcctctgccaatggagacggaggaggaggatcctaaagaagagcctataaaggagataaaggaggagcccaaagaagaggagatgactgaagaagaaaaggctgcccagaaggcaaagccagttgctactgctcctattcctggtactccatggtgtgtcgtttggactggtgatgagcgggtcttcttttataatcccaccactcgtctttctatgtgggaccgacctgatgatctgattggcagggcagatgttgacaaaattattcaggagccccctcataaaaaaggaatggaggaattgaagaaactaaggcacccaactccgacaatgctgtcgatccaaaagtggcaattctctatgagtgcaattaaagaggaacaagaattaatggaagaaattaatgaagatgagcctgttaaagcaaaaaaacggaagagagacgataataaagacattgactcagagaaagaagctgccatggaagctgaaattaaagctgcccgagaaagggccattgtccctctggaggctcgaatgaagcagttcaaggacatgctgctagagagaggggtgtctgctttttcaacgtgggagaaggagttgcacaagatagtttttgatccccggtacttacttctcaatcctaaagagagaaaacaggtgtttgatcagtatgtaaagaccagggcagaggaagaacgcagggaaaagaaaaataaaataatgcaagccaaggaagatttcaaaaaaatgatggaagaagcaaaatttaatccaagagcaacttttagtgaatttgcagccaagcatgctaaagattcaagattcaaagcaattgaaaagatgaaagaccgagaagccttgtttaatgagtttgtggccgctgctaggaagaaagagaaagaagattcgaagaccagaggtgagaagattaaatcggatttctttgaactattatctaatcatcacttggacagtcagtctcgatggagcaaagtaaaagacaaagtagaaagtgatccacgttacaaagcagtagatagttcatcaatgagagaagaccttttcaaacagtacattgaaaaaatagccaagaatttagactcagaaaaagaaaaggagcttgaaaggcaagcccgcattgaggcaagccttcgagaacgagaaagggaggttcaaaaggcccgttcagaacaaacaaaagaaatagatcgagagagagagcagcacaaacgagaagaagctatccagaatttcaaagctcttctgtctgacatggtacgttcttcagatgtgtcatggtctgatactcgtaggaccctccgaaaagatcaccgctgggaatctggatccttattggaaagagaggagaaagagaagctttttaatgaacacattgaagcacttaccaaaaaaaagagagagcactttaggcaacttctggatgaaacttctgcaattaccttaacatccacgtggaaagaagtaaaaaaaatcattaaggaagatcctcgatgtattaagttctcctccagtgacaggaaaaaacaaagagaatttgaagaatatatcagagacaaatatatcacagccaaagctgacttcaggacgcttttgaaagagaccaaatttataacatatagatccaaaaaattaatccaagaatcagatcagcacctgaaagatgtagaaaaaattttacagaatgacaaacggtatctagtactggactgtgtgccagaggagaggcgtaaactgattgtggcatatgttgatgacctggatcgccggggtccacccccacctcccacagcatcggagcccacgagacgatcaacaaaataattctaaatactcttccataggggcatctattcaaaatgcttgcatgagccaattttcaggtttttacatatatgtgcattagtcaacctattgcgaaaccatctgacaaacagaaggagaagcatttgtgaacagtttctgaacagaacactttggaaatatttatgcttttctttgtgtggcatgactgacatacatactcaaatataggctgtctctagtaaatcttaaaatcttgaagctaaaattcatccttttatgaggtgtggaagtcagtgacttggtgacgttcttcctagcagtgttaatacatgcaagaagtaagagcatttgtggcttgaacttgccagatgcaaataccacagactccaagaaaacccgagttggggtttgttttgttttgattttttttttttaaagcgggtaaaagagaaaacactgaaaattgaattcttatcttccagaggctacaattattataatggacaatacttttacctttgtctctaaagatcagattagttttatttgttcacttacgtgctttgattatcccctctgaattatagaccgagtcttgttgtttagcctaagagaagatttatgtagtaatttcttctcaggtatggaaccacggtcataactaacatgttggccagaatagaaccactggttaaacatattttattcaccattaagtgatctttatcaatattctggattagacaacaaattacctttctgggtgtttcttgtaaactatactcctgtttgaatgttaaactttgttgctaaagtttaattttaagatgtttgaatgttcagtttatgtatttgaactacaataaaccaaccctttttataaaaaaaaaaaaaaaaaaaaaaaaaaaaaaaaa

SEQ ID NO: 1033 - DNA, 3241 bp, Homo sapiens
cgtggccctgtggcagccgagccatggtttctaaactgagccagctgcagacggagctcctggcggccctgctcgagtcagggctgagcaaagaggcactgatccaggcactgggtgagccggggccctacctcctggctggagaaggccccctggacaagggggagtcctgcggcggcggtcgaggggagctggctgagctgcccaatgggctgggggagactcggggctccgaggacgagacggacgacgatggggaagacttcacgccacccatcctcaaagagctggagaacctcagccctgaggaggcggcccaccagaaagccgtggtggagacccttctgcaggaggacccgtggcgtgtggcgaagatggtcaagtcctacctgcagcagcacaacatcccacagcgggaggtggtcgataccactggcctcaaccagtcccacctgtcccaacacctcaacaagggcactcccatgaagacgcagaagcgggccgccctgtacacctggtacgtccgcaagcagcgagaggtggcgcagcagttcacccatgcagggcagggagggctgattgaagagcccacaggtgatgagctaccaaccaagaaggggcggaggaaccgtttcaagtggggcccagcatcccagcagatcctgttccaggcctatgagaggcagaagaaccctagcaaggaggagcgagagacgctagtggaggagtgcaatagggcggaatgcatccagagaggggtgtccccatcacaggcacaggggctgggctccaacctcgtcacggaggtgcgtgtctacaactggtttgccaaccggcgcaaagaagaagccttccggcacaagctggccatggacacgtacagcgggccccccccagggccaggcccgggacctgcgctgcccgctcacagctcccctggcctgcctccacctgccctctcccccagtaaggtccacggtgtgcgctatggacagcctgcgaccagtgagactgcagaagtaccctcaagcagcggcggtcccttagtgacagtgtctacacccctccaccaagtgtcccccacgggcctggagcccagccacagcctgctgagtacagaagccaagctggtctcagcagctgggggccccctcccccctgtcagcaccctgacagcactgcacagcttggagcagacatccccaggcctcaaccagcagccccagaacctcatcatggcctcacttcctggggtcatgaccatcgggcctggtgagcctgcctccctgggtcctacgttcaccaacacaggtgcctccaccctggtcatcggcctggcctccacgcaggcacagagtgtgccggtcatcaacagcatgggcagcagcctgaccaccctgcagcccgtccagttctcccagccgctgcacccctcctaccagcagccgctcatgccacctgtgcagagccatgtgacccagagccccttcatggccaccatggctcagctgcagagcccccacgccctctacagccacaagcccgaggtggcccagtacacccacacgggcctgctcccgcagactatgctcatcaccgacaccaccaacctgagcgccctggccagcctcacgcccaccaagcaggtcttcacctcagacactgaggcctccagtgagtccgggcttcacacgccggcatctcaggccaccaccctccacgtccccagccaggaccctgccggcatccagcacctgcagccggcccaccggctcagcgccagccccacagtgtcctccagcagcctggtgctgtaccagagctcagactccagcaatggccagagccacctgctgccatccaaccacagcgtcatcgagaccttcatctccacccagatggcctcttcctcccagtaaccacggcacctgggccctggggcctgtactgcctgcttggggggtgatgagggcagcagccagccctgcctggaggacctgagcctgccgagcaaccgtggcccttcctggacagctgtgcctcgctccccactctgctctgatgcatcagaaagggagggctctgaggcgccccaacccgtggaggctgctcggggtgcacaggagggggtcgtggagagctaggagcaaagcctgttcatggcagatgtaggagggactgtcgctgcttcgtgggatacagtcttcttacttggaactgaagggggcggcctatgacttgggcacccccagcctgggcctatggagagccctgggaccgctacaccactctggcagccacacttctcaggacacaggcctgtgtagctgtgacctgctgagctctgagaggccctggatcagcgtggccttgttctgtcaccaatgtacccaccgggccactccttcctgccccaactccttccagctagtgacccacatgccatttgtactgaccccatcacctactcacacaggcatttcctgggtggctactctgtgccagagcctggggctctaacgcctgagcccagggaggccgaagctaacagggaaggcaggcagggctctcctggcttcccatccccagcgattccctctcccaggccccatgacctccagctttcctgtatttgttcccaagagcatcatgcctctgaggccagcctggcctcctgcctctactgggaaggctacttcggggctgggaagtcgtccttactcctgtgggagcctcgcaacccgtgccaagtccaggtcctggtggggcagctcctctgtctcgagcgccctgcagaccctgcccttgtttggggcaggagtagctgagctcacaaggcagcaaggcccgagcagctgagcagggccggggaactggccaagctgaggtgcccaggagaagaaagaggtgaccccagggcacaggagctacctgtgtggacaggactaacactcagaagcctgggggcctggctggctgagggcagttcgcagccaccctgaggagtctgaggtcctgagcactgccaggagggacaaaggagcctgtgaacccaggacaagcatggtcccacatccctgggcctgctgctgagaacctggccttcagtgtaccgcgtctaccctgggattcaggaaaaggcctggggtgacccggcaccccctgcagcttgtagccagccggggcgagtggcacgtttatttaacttttagtaaagtcaaggagaaatgcggtggaaaaa

SEQ ID NO: 1034 - DNA, 4734 bp, Homo sapiens
tccggaggcgagccgagcgcggtggtgaggccgcctcagcgaaaaaaatgtccgcctgaagagacccacaagttctattcggggggaccgacagcccgccccgggaggaaggggcggccaggcccgaaagccgcctccccctcccagacccgagagctcgtgcggggcaaagtgaaccgagccgctgggcggtgcaaggggaagcccaagcccgttctcccggccaaagtgaactttaatcggggtggttggatgcggagacggggcggcaggacctgctagaagtggccgaagatgaatccccagcaacaacgcatggccgctatagggaccgacaaggagctgagcgacctactggacttcagtgcgatgttttccccacctgttaatagtgggaaaactagaccaactacactgggaagcagtcaattcagtggatcaggtattgatgaaagaggaggtacaacatcttggggaacaagtggtcaaccaagtccttcctatgattcatctagaggttttacagacagccctcattacagtgatcacttgaatgacagtcgattaggagcccatgaaggcttgtccccaacacctttcatgaactcaaatctgatgggaaaaacatcagagagaggctcattttccctgtacagcagagatactggattaccaggctgtcaatctagtctcctgagacaagatctggggcttgggagcccagcacagctatcttcttcaggaaaacctgggacagcatactattcattctctgctacaagttccaggaggagaccactccatgactctgcagcgcttgatcccttgcaagcaaaaaaagtcagaaaggtgcctcctggtttgccttcttctgtatatgcaccatccccaaattcagatgatttcaaccgtgaatctcctagttatccatctcctaagccaccaaccagtatgttcgctagcactttctttatgcaagatgggacccacaattcttctgacctttggagttcatcaaatgggatgagccagcctggttttggtggaattctggggacctccacttcccacatgtctcaatccagtagttatggcaaccttcattcacatgaccgcttgagttatcctccacactcagtttcaccaacagacataaacacgagtcttccaccaatgtccagctttcatcgcggcagtaccagcagttcaccttacgttgctgcctcacacactcctcccatcaatggatcagacagcattctaggaaccagagggaatgctgctggaagctcacagacaggtgatgcacttggaaaggctttggcatctatttattctcctgaccataccagcagtagttttccgtcaaatccatcaacaccagttggatcaccttcacctctcacaggtaccagtcagtggccaagacctggagggcaagcaccttcatccccaagctatgaaaactcactccactccctgcagtctcgaatggaggatcgtttagacagactggatgatgcaatccatgtgctgcggaaccatgctgtgggaccttccaccagtttgcctgctggtcacagtgatatacatagtttattgggaccatcccataatgcaccaattggaagcctcaattcaaactatggaggatcaagccttgttgcaagcagtcgatcagcttcaatggttggaactcatcgggaagactctgtcagtctcaatggcaatcattcagtcctgtctagtacagtcactacttcaagcacagacctgaaccataaaacacaagaaaattatagaggtggcttgcaaagtcagtctggaactgttgttacaacagaaatcaagactgaaaacaaagaaaaggatgaaaaccttcatgaacctccttcatcagatgacatgaagtcagatgatgaatcctcccaaaaagatatcaaggtttcatctagaggcagaacaagcagtactaatgaagatgaggatttgaaccctgaacagaagatagaaagggagaaggagaggcggatggctaacaatgccagagaacgcttacgcgtgcgggatattaatgaagcattcaaagagcttggccgaatgtgtcagcttcacttgaagagtgaaaaaccccaaacaaaactccttattcttcatcaagccgtggcagtcatccttagtctagaacagcaagtcagagagaggaaccttaaccccaaagcagcctgccttaagagaagggaagaagaaaaagtttctgccgtatcggcagagccgccaaccacactgccaggaacccatcctgggcttagtgaaactaccaaccctatgggtcatatgtaaacatcagccagttccagagttatcagtaggctagatagaaggtgacctctcctcataaggacttggacaactcagattatctgaagacacaaacctgacaggagggagaagaaaaaacaaaacacttgaaccaagaaactcaaatgtaatcctacgatcaaagcaactggtcaacacttccatcagaagtgaagataggaagctcatcagatagaacatcagcccatgagatgtttgcaacaaatcttttgttgcaagcagtgtgtcgcttctgcacaatcagagactgtctcgatctctccactcaccgtggaagttgccttgtgcctaaactgaattgacaaatgcattgtaactacaaattttatttattgttatgaaactgtaaggtctacatataaagggaaaaagttaatgtggaaagctgatctacactcagctgatgccagcatacattaaagcggttcacgtgcagagaacaaagcagtgacaaccattggcccttagcattcccggcatacctattagtgtcttaaaaaggaagggaaaagtcttttgttgccctctcctatcctcttgccatatgaatagcgttttccatgaaataggaaaatattacttggtatagcatttctcttgctctcattttttgatttatttttattttctctttgtgggtgttatatttgatctctaaatctgaacagtttatggtcacagtccagcctcctccgtgcagccctgtgtgctttgcacatttaccttacagtggtaagcagagaccatctgtgaccatagcctagctagcattttaaaaggggaaattttgttctctaggttttcccccaaataaacattgctttatttctaataataaccaagacttttcaagcttctagatctcataggaaagcttgtaatagcaaaattgtaaattacaagggaagaatctactttttagaaatcgctttgttttccaagcagtaagtactacatacagtacttgtaaagtgttagctgtaagtaagcacaaaatacatttaaaatacaaagacgattttttcaggctgtgattatggtgaacataacaaaacccagtagtcaccaaggcaggtagtgtgataaatgaacacaccactctgaggctaattacctaatggaatacaagagcaatggtcacccgtatttccttatcctagcctttatttctctgtcatttggatggctggtcaatggggaagaattgagtgggtgatttaatcaactgcaaaccatctgcccctgtcccaaaatgatgagccagattagcattaaaccagtacttgtcagtccatcttaatactgttcattaaggcactctctgtctctaatccttaggagttgttttaaaagacataatcactttgaacttccatgaaacctgtcttccaccacaacaaccctgggagagaaaaacatgctaaaggaggtatcttggcttaataattccttatagccaatatcaacagtggcaatcagcacacagaggaaaggacccaaatcactatgtagcttaaagatttctgttaatttgaaagaacaaaaacaagacagaacttctggtactctaatcaggatgattcctaacaagtcagtcatttgtgaacttagtggactttttggttactttaatttgcatatattctccagttacatcggactctatctgtggccttgttcttcatttcagtgttaatcagctaaacagaagttgttgcttatgatgtgtgagtgaacatatgccactgcctggcctttttttcttcagagcttgttgtctttttcgctatattagactttgcagtatgcccagaagctttccttcataaaatagaaagaaaaaaacatttggcttatttttcactgtagctagtcttttatacaataatcttgtaagaaaatttcttgaattctaaatattactctttctagatttttgaaatcaaaaagttttcagtaaaaagtttcttactttattttattatattaggtagtaaaaaatgtagggttatttaccataacctgttcattaatatcagaaatttacaatagcattttaagaccatagtaggattctagcataccgtgtagtacctatggagtattgtaagagctaattgttggagatgaattgcttctcatcttgttctccagtttccattgttggtttattgcagatttgtatcctgtgtcaaattcaaggtattattgataaaccttttcaaccagcagcaagaagttcaaatttttttctgtcactgtaacagaaaacacaatatgtatataacatttatgtagcaataaatgtgccatcttttttttaacacagtaaaaaaaaaaaaaaaaaaaaaa

SEQ ID NO: 1035 - DNA, 1227 bp, Homo sapiens
cggcgcacggagggacgcggccggcgcccatggcgttcgcgctgctgcggcccgtcggcgcgcacgtgctgtacccggacgtgcggctgctgagcgaggacgaggagaaccgcagcgagagcgacgcgtcggaccagtcgttcggctgctgcgagggcccggaggcggcgcggcgcggcccgggccccgggggcgggcggcgggcgggcggcggcggcggcgcgggccccgtggtggtggtgcgacagcggcaggcggccaacgcgcgggagcgggaccgcactcagagcgtgaacacggccttcacggcgctgcgcacgctcatccccaccgagccggtggaccgcaagctgtccaagatcgagacgctgcgcctggcgtccagctacatcgcgcacctggccaacgtgctgctgctgggcgactcggccgacgacgggcagccgtgcttccgtgccgcgggcagtgccaagggcgccgtccccgccgccgccgacggcggccgccagccgcgctccatctgcaccttctgcctcagcaaccagcgcaaggggggtggccgtcgtgacctggggggcagctgcttgaaggtgaggggggtggccccccttcgagggccacggagatgagcctggaccctggagaaggaggccaggagccagccactggctggacagggaagaagaccccaggagccaagcccaccccttctttgtgtagggaccgggggaccatggcctgttccgggacactctgggcagggccctcgggacatctccacccgatcctggagagctgtgaggatccattcagcctgcccagctctggctggtcagagacaaggcagaacttttggaaaaacaaagactgttggtgacagggtgtgtgtgtatctgtgcgtgagtgtgagtgtgtgtgagagagaattggtgagtttaaaataaaagctatttttaaataaaagacgtcgttctgagctgaggagagtcccgtggacatcggaggtcagaggtgggccctcccctggacctagagagaggcacagatgttctgggggctgccctgagccctggaagggtgggggtggggcgggggaaggcaggcagagccccctctccgggcgccataaccaaactttcctcagtctgctgtttatcagatgttcttaacaactgttaggtgtctgatatggttggtaaagaaatcttaattttacttatttttgaa

SEQ ID NO: 1036 - DNA, 3306 bp, Homo sapiens
gttcgggcccgggaattccgaaggaggggtaggcgctgcccgcgcgcagaggccgcgcccctcctggccccggcttcttggctgtcaaacagatgcagcaacgtcggctcctgccgaggagcccaaggggtcccgggatccgccgcacaggctggcactgcttgaagaggaggctactcggagactgcgccgcgcggtggattcattgccctcggaggttcaaccagttatgagtgagggattggccagaagatcggggcgcaggcaagcaggagtgctctattaggataagcaagtttgacaggaagaagctactcttctccgaattacacagaggtgatgtgttcgtattgcacgtagacgtgtgtataacaggacctccttccccgcgccccgccaccccgacacacacaggagctgcctaaagtatccttgccttgcagattggaggctccccaaatattttgcgatctgaggatccagctcaagtgaggtgccataggacgtgttcctgagtttgcattgcacggagaccttcctggaatttttcatttgcaagtcggcttaaccaattttgcattgagtcctaggctgcttgcactctgaatttgggctattcaggtagtgtgctcaaagttgaaaccgcatacagcacaactcaagtttgcatcagactgggaagcgaacttaagccagcggtgcgtggcccaggagtgggaaaggaaatggatgcctgaagtggaagaggtggtgcagagggggcaccgcccatgctgccctgcttccaactgctgcgcatagggggcggcaggggcggtgatctctacaccttccacccccccgccggggctggctgcacctatcgcttgggccacagggccgacctgtgtgatgtggccctgcggccccagcaggagcctggcctcatctctgggatccacgccgaactgcatgccgagccccggggtgatgactggagggtcagcctggaagaccacagcagccaaggtactttggtcaataatgtccgactcccaagaggtcacaggctggaattgagtgatggagacctcctgacctttggccctgaagggcccccaggaaccagcccctcggagttctacttcatgttccaacaagtacgagtcaagcctcaggactttgctgccattaccatcccacggtctaggggagaagcccgggttggggctggtttccggcctatgctgccctcccagggggctccacagcggcctctcagcaccttctcccctgcccccaaggccacactgatcctaaactccataggcagcctcagcaagctccggccccagcccctcaccttctcccctagttggggtggaccaaagagcctgcctgttcccgccccacctggggaaatggggaccacgccttctgctccaccacaacgcaatcggaggaaatctgttcaccgagtgttggcggaactggatgatgagagtgagcctcctgagaacccgccaccggtccttatggagcccaggaagaaactccgtgtagacaaagccccactgactcccactggaaatcgacgtggccgtcctcggaagtacccagtgagcgctcccatggctccccctgcagttgggggcggggagccctgtgcagctccttgttgctgcctgccccaggaagagacagtggcctgggttcagtgtgatggctgtgacgtctggttccatgtggcctgtgttggctgcagcatccaggctgccagggaggccgacttccgatgcccagggtgccgggctggcattcagacctaaggtccactgccaaggcaccatcggacacacctgcccatgagtagacacagcagcgagcaaataggtctgataaataccccccttcccttccctccccaggagggaatgactacagggaagaaggatggattgatgtggactcattcagggcctggagcagaccctggtggccaagacagaagagatggtttcctgccaaagatattgccacctccaggaaattgccagtgagctggaagttcccactattacaagccataaggccatgttgccatggacaccagaatatctgtagtcagagcacctatcagttgcaaaagccatgcctgcaaccgatggaaaatgtaagagggagttcttaaggttcttggtggcatcacccaaggcattctgggaaaacctagggcctggccccaaaacttccctactctgtggctagtcctgctgccaacaaaatcgtagcgacctggcttttcacagctttgcttttatttccaagtcaaggacaagccgcttcattcactcctgggcatttactcttcttgtgggtctgtgatattccttgctttccagggagaatgtgcttggcaaggtctggagaactaattcagaatcttaggggaaggggagagatggaaatacaaacctgcttactggaaaggtgcaaatatatgggttgagctggaggtaggaatacaggtaattaaggtttctagtttaagggaaaacagatctattgccatttaaataaggtaactgggatttggttaagttcacaaagatagcagaagatttatttacaggcttcacctgtactgtcagggcaagagaaagcctggtaaaccagctacagcagtttaccagtgtgatggctgtgacacagctccactccacgggtggacacagcagagggcaactgggctggcctggttcagtgtgaatcaaaccgcttaacccacacatggtacatgtgattttcttttgtgagccttacaccaagccaaactattgtcaaagcatcatttctatagaaataaagccttatcttgacctgttctattaaaacctgccacacccgccctttcctacctagatttaatgagcccaagtttttaaaatggaagaaatgactctggggcaaagacccctaatgaactagtggcagagccaggaataaaacttgagtaactaatgagtcacttatgggcagagtatgcaaaaaccttaagtggaaaccaaatagaccctggtatcaagaaagcacaaagtattaatagaagtttctggttggggtgatctaggttcaacagaaataagatgatttctaagtataaagccatttaagaattccagagtagggtgggaaagcaaaaagccagctctgaacaggtaacagctacatggtgactgagtctatgggcaaaagttcttgcatcacaggcttttgggaactagcctatcacagggccctgtacaaataaacttggctgcaatccca

SEQ ID NO: 1037 - DNA, 3277 bp, Homo sapiens
cccgccagctcgcggagccgctctgccccgcgccctagcccgcgcctgcagcccgcccaggcggagtcagcccgcgctccgcccgccgcgatccgagctcggaggttcggactccgggctcgccgccccccgggccggctccgcgccccgcactcccggcgcccagcgccccgcgccccggcgggcggagcgcaccatgccgcagctggactccggcgggggcggcgcgggcggcggcgacgacctcggcgcgccggacgagctgctggccttccaggatgaaggcgaggagcaggacgacaagagccgcgacagcgccgccggtcccgagcgcgacctggccgagctcaagtcgtcgctcgtgaacgagtccgagggcgcggccggcggcgcagggatcccgggggtcccgggggccggcgccggggcccgcggcgaggccgaggctctcgggcgggaacacgctgcgcagagactcttcccggacaaacttccagagcccctggaggacggcctgaaggccccggagtgcaccagcggcatgtacaaagagaccgtctactccgccttcaatctgctcatgcattacccacccccctcgggagcagggcagcacccccagccgcagcccccgctgcacaaggccaatcagcccccccacggtgtcccccaactctctctctacgaacatttcaacagcccacatcccacccctgcacctgcggacatcagccagaagcaagttcacaggcctctgcagacccctgacctctctggcttctactccctgacctcaggcagcatggggcagctcccccacactgtgagctggttcacccacccatccttgatgctaggttctggtgtacctggtcacccagcagccatcccccacccggccattgtgcccccctcagggaagcaggagctgcagcccttcgaccgcaacctgaagacacaagcagagtccaaggcagagaaggaggccaagaagccaaccatcaagaagcccctcaatgccttcatgctgtacatgaaggagatgagagccaaggtcattgcagagtgcacacttaaggagagcgctgccatcaaccagatcctgggccgcaggtggcacgcgctgtcgcgagaagagcaggccaagtactatgagctggcccgcaaggagaggcagctgcacatgcagctatacccaggctggtcagcgcgggacaactacgggaagaagaagaggcggtcgagggaaaagcaccaagaatccaccacaggaggaaaaagaaatgcattcggtacttacccggagaaggccgctgccccagccccgttccttccgatgacagtgctctaggctgccccgggtccccagctccccaggactcaccctcataccatctgctgccccgcttccccacagaactgcttactagccctgcggagccggcacctacatccccaggtctctccactgctctcagcctcccaaccccagggcccccacaggccccccgcagcaccctgcagagcacacaggtacagcaacaggaatctcagagacaggtggcctagcaggcacaggacacctggccgcctccaggagcctaccccctgaaagtgacagagacccagatctcatggaaactggccaggggtcctgttaacgtcatctcagggtccagaccctgaagatttcagaggctgcaggacttctgcctgaacctggggtcatcgattcaaactgctccaagtggtgggaatcagatctgtcttgatgtgtcatctaattaagggaatcccttgtacctatggctgcctgcatctattctttgtaccatctgtcttgccagccagaagcctctgcctccctagcttttctgctataggtcagagatgggctgaactgagcctagctaccttctctacccatctcccccatcccccactgccacaccctccccattcagacacttcatggaccaagaatgagctggtttgtcaaacaacatgtgagcatggtcacaagcacaaagctcaagatgacagctcttctaaggaaatggagaagctctgtttataaaaacaaaaacaaaaccagctgctactcataagttggaccagaggaagccccttactatgatctcaggagcttgcaagaagcaggaaggggaatggaataggttaagtttaggcctatcaacctaagcaacagaaataatctgacactaccttatcaggcaaattggggaggggagggtgtatctagctctagttcaaattatttggaagtgttccctgagaaacccaccagcctaagaagctctggccccaggcttgtcactagcagctgcagtcaacagttcaaagaagtcatggcccaaatccagtgtgcacccctccccattcacagagcctttttcacaattccatttccagttcatctatggcagtccagccagctcctgggcagcttgagagggcaaacccaaaacctcatgacagccagagcctgtctttcagcattcagtccgcctggccggctccagtttccccatggggctgcgggacagaggaccattacaactagatcaaggagcccagaaaacctccagtagtggacaacaggttttcaccatagcctacgttaacccatttttgagccaagcttcaaccctcagccttgaaaaacaagtctttaatttaatttttgttttttgcctaaatccaaagaaaaagggctgccgggccaggcgcggtggctcacgcctgtaatcccagcactttggcaggccgaggcaggtggatcacctgacgtcagtagtttgagaccagcctggccaacatggtgaaaccctgtatctactaaaaatacaaaaattagccggacgtggtggtgcgcgcatgtaatcccagctactcgggaggctgaggcggaagaatcacttgaacccgggaggcggaggttccagtgagccgagatggcgctattgcactccagtctgggtaacagggagactgcatctcaaaaaaaaaaaaaaaaaaaaaaaagggctgtccatgtattcacacacccctcaaaaaaagcctttagttcctactttagccactggtttctcagaatccaaagatcacatattctagtgtaacactgcaagaagtcttgagaaaaagattattgtagtgttcaaaatatttttgtattgttaatgcatcatcatagaaaaacttttaaacatgagaataaagatactttttactgggtttgtttttcaaagcctga

SEQ ID NO: 1038 - DNA, 401 bp, Homo sapiens
aacctacaaccacgtgccttcccaggaaatcaccagtcaccgtgaaaaaggaggaggaaaagaagccccacgtgaagaagcctctgaatgccttcatgttgtatatgaaggagatgagggccaaggtggtggctgagtgcaccctgaaggaaagtgcagccattaaccagatccttggaagaaaggtaagacctgccctctccctccaggccagggaggcagcgtccctgcattgatggctccgtgtggtctctgaccctctctcccccagtggcacaacctgtctcgagaagaacaggccaagtactacgagctggcccggaaggagcggcagcttcactcgcagctctacccaacctggtcagcccgggacaactatgtggggtgcacactctgggcag

SEQ ID NO: 1039 - DNA, 4004 bp, Homo sapiens
aataatctccgctcccagactactccgttcctccggatttcgatccccctttttctatctgtcaatcagcgccgcctttgaactgaaaagctctcagtctaacttcaactcactcaaatccgagcggcacgagcacctcctgtatcttcggcttccccccccctttgctctttatatctgacttcttgttgttgttggtgttttttttttttttaccccccttttttatttattatttttttgcacattgatcggatccttgggaacgagagaaaaaagaaacccaaactcacgcgtgcagaagatctccccccccttcccctcccctcctccctcttttcccctccccaggagaaaaagacccccaagcagaaaaaagttcaccttggactcgtctttttcttgcaatattttttgggggggcaaaactttttgggggtgattttttttggcttttcttcctccttcatttttcttccaaaattgctgctggtgggtgaaaaaaaaatgccgcagctgaacggcggtggaggggatgacctaggcgccaacgacgaactgatttccttcaaagacgagggcgaacaggaggagaagagctccgaaaactcctcggcagagagggatttagctgatgtcaaatcgtctctagtcaatgaatcagaaacgaatcaaaacagctcctccgattccgaggcggaaagacggcctccgcctcgctccgaaagtttccgagacaaatcccgggaaagtttggaagaagcggccaagaggcaagatggagggctctttaaggggccaccgtatcccggctaccccttcatcatgatccccgacctgacgagcccctacctccccaacggatcgctctcgcccaccgcccgaacctatctccagatgaaatggccactgcttgatgtccaggcagggagcctccagagtagacaagccctcaaggatgcccggtccccatcaccggcacacattgtctctaacaaagtgccagtggtgcagcaccctcaccatgtccaccccctcacgcctcttatcacgtacagcaatgaacacttcacgccgggaaacccacctccacacttaccagccgacgtagaccccaaaacaggaatcccacggcctccgcaccctccagatatatccccgtattacccactatcgcctggcaccgtaggacaaatcccccatccgctaggatggttagtaccacagcaaggtcaaccagtgtacccaatcacgacaggaggattcagacacccctaccccacagctctgaccgtcaatgcttccatgtccaggttccctccccatatggtcccaccacatcatacgctacacacgacgggcattccgcatccggccatagtcacaccaacagtcaaacaggaatcgtcccagagtgatgtcggctcactccatagttcaaagcatcaggactccaaaaaggaagaagaaaagaagaagccccacataaagaaacctcttaatgcattcatgttgtatatgaaggaaatgagagcaaaggtcgtagctgagtgcacgttgaaagaaagcgcggccatcaaccagatccttgggcggaggtggcatgcactgtccagagaagagcaagcgaaatactacgagctggcccggaaggagcgacagcttcatatgcaactgtaccccggctggtccgcgcgggataactatggaaagaagaagaagaggaaaagggacaagcagccgggagagaccaatgaacacagcgaatgtttcctaaatccttgcctttcacttcctccgattacagacctgagcgctcctaagaaatgccgagcgcgctttggccttgatcaacagaataactggtgcggcccttgcaggagaaaaaaaaagtgcgttcgctacatacaaggtgaaggcagctgcctcagcccaccctcttcagatggaagcttactagattcgcctcccccctccccgaacctgctaggctcccctccccgagacgccaagtcacagactgagcagacccagcctctgtcgctgtccctgaagcccgaccccctggcccacctgtccatgatgcctccgccacccgccctcctgctcgctgaggccacccacaaggcctccgccctctgtcccaacggggccctggacctgcccccagccgctttgcagcctgccgccccctcctcatcaattgcacagccgtcgacttcttccttacattcccacagctccctggccgggacccagccccagccgctgtcgctcgtcaccaagtctttagaatagctttagcgtcgtgaaccccgctgctttgtttatggttttgtttcacttttcttaatttgccccccacccccaccttgaaaggttttgttttgtactctcttaattttgtgccatgtggctacattagttgatgtttatcgagttcattggtcaatatttgacccattcttatttcaatttctccttttaaatatgtagatgagagaagaacctcatgattctaccaaaatttttatcaacagctgtttaaagtctttgtagcgtttaaaaaatatatatatatacataactgttatgtagttcggatagcttagttttaaaagactgattaaaaaacaaaaagaaaaaaaaagcaattttgaagcagccctccagaaggagttggttctgtattatttgtattaaatacgagcttgcgaaccaatcattttacatctggtttttaaaccgtaagggcaccatgaatgcagtgccgttactttttttttttttttctgtgtgaaacaactcttattgtgatgttacttgttattgtttaaatgtacagaaacaaagggtaaaaatgtgttaatataccttgttccatggtgttgttcttttggggggaggggacgctactcaacacttaatagaatcacaacgctgttgggccagtagtatttattgctttagagattgcttgtcgtacctgtatgtcgtccctttttaaatatgttttcctttttcttgaaactgtataaagtttttttcccccttagcataagcatcttatatataacaactcatttgtacaaggtttttaagtttatatataaaatgtgtatatatatttttgtttcccctttttgacttttttttttctgtatgaaacccagatgtcaccaaatggacattaatagttgcattaaggatcagtagcattaacaaaagttgctttaaaagccattatgtaaaacaagacttgaaaatgagtgagggaattttagcgacactgtctgagcagcagtgggaaccatcttcgtttcccctttgaactcccagtgggatgccctaccctgcgcccttaggacccggactgaccgtgtacaaaactttacgtgccaaaattctcagtgaatttagctttctccctctttttgatgctgtaatttttgttcatcatgttttgctgtgatgttacataggtagatttgtatgtagttttaatgtcacctataacaaaatgtgtttggtagcagattgtccagaaagcattttaaatgaagaggtataaacccttaagggccaaaattctgtatattagattactcttaaacgaaaaaccagctgccgcttttatgtacacatattacatacgagtaggcagcagactttaaaaataaaaaaaacctaggcatgttgatgttgcaaaatgctgtataaagctgaaacctgttcattcagtgccattgtagttgacatgaagcgattgtaaaactgtctccgatttttctctggtttattaaaatgctaactataacattttttgtgaatactttgaatgtttcctaacagttgtgatgttactgttccgttttatgctcttattccaagttcatttttaatggtttggaagccatttttgtaatgaataaatgttcatgctgtacagtatctgtagcatgccgttctggattaataaaagcaacttagtatgtgcagataaa

SEQ ID NO: 1040 - DNA, 5998 bp, Homo sapiens
gggggggaagggggagggagggggaggaggtgactcgagcatttagacacaagcgagaggatcatggcggatggccccaggtgtaagcgcagaaagcaggcgaacccgcggcgcaataacgttacaaattataatactgtggtagaaacaaattcagattcagatgatgaagacaaactgcatattgtggaagaagaaagtgttacagatgcagctgactgtgaaggtgtaccagaggatgacctgccaacagaccagacagtgttaccagggaggagcagtgaaagagaagggaatgctaagaactgctgggaggatgacagaaaggaagggcaagaaatcctggggcctgaagctcaggcagatgaagcaggatgtacagtaaaagatgatgaatgcgagtcagatgcagaaaatgagcaaaaccatgatcctaatgttgaagagtttctacaacaacaagacactgctgtcatttttcctgaggcacctgaagaggaccagaggcagggcacaccagaagccagtggtcatgatgaaaatggaacaccagatgcattttcacaattactcacctgtccatattgtgatagaggctataaacgctttacctctctgaaagaacacattaaatatcgtcatgaaaagaatgaagataactttagttgctccctgtgcagttacacctttgcatacagaacccaacttgaacgtcacatgacatcacataaatcaggaagagatcaaagacatgtgacgcagtctgggtgtaatcgtaaattcaaatgcactgagtgtggaaaagctttcaaatacaaacatcacctaaaagagcacttaagaattcacagtggagagaagccatatgaatgcccaaactgcaagaaacgcttttcccattctggctcctatagctcacacataagcagtaagaaatgtatcagcttgatacctgtgaatgggcgaccaagaacaggactcaagacatctcagtgttcttcaccgtctctttcagcatcaccaggcagtcccacacgaccacagatacggcaaaagatagagaataaaccccttcaagaacaactttctgttaaccaaattaaaactgaacctgtggattatgaattcaaacccatagtggttgcttcaggaatcaactgttcaacccctttacaaaatggggttttcactggtggtggcccattacaggcaaccagttctcctcagggcatggtgcaagctgttgttctgccaacagttggtttggtgtctcccataagtatcaatttaagtgatattcagaatgtacttaaagtggcggtagatggtaatgtaataaggcaagtgttggagaataatcaagccaatcttgcatccaaagaacaagaaacaatcaatgcttcacccatacaacaaggtggccattctgttatttcagccatcagtcttcctttggttgatcaagatggaacaaccaaaattatcatcaactacagtcttgagcagcctagccaacttcaagttgttcctcaaaatttaaaaaaagaaaatccagtcgctacaaacagttgtaaaagtgaaaagttaccagaagatcttactgttaagtctgagaaggacaaaagctttgaagggggggtgaatgatagcacttgtcttctgtgtgatgattgtccaggagatattaatgcacttccagaattaaagcactatgacctaaagcagcctactcagcctcctccactccctgcagcagaagctgagaagcctgagtcctctgtttcatcagctactggagatggcaatttgtctcctagtcagccacctttaaagaacctcttgtctctcctaaaagcatattatgctttgaatgcacaaccaagtgcagaagagctctcaaaaattgctgattcagtaaacctaccactggatgtagtaaaaaagtggtttgaaaagatgcaagctggacagatttcagtgcagtcttctgaaccatcttctcctgaaccaggcaaagtaaatatccctgccaagaacaatgatcagcctcaatctgcaaatgcaaatgaaccccaggacagcacagtaaatctacaaagtcctttgaagatgactaactccccagttttaccagtgggatcaaccaccaatggttccagaagtagtacaccatccccatcacctctaaacctttcctcatccagaaatacacagggttacttgtacacagctgagggtgcacaagaagagccacaagtagaacctcttgatctttcactaccaaagcaacagggagaattattagaaaggtcaactatcactagtgtttaccagaacagtgtttattctgtccaggaagaacccttgaacttgtcttgcgcaaaaaaggagccacaaaaggacagttgtgttacagactcagaaccagttgtaaatgtaatcccaccaagtgccaaccccataaatatcgctatacctacagtcactgcccagttacccacaatcgtggccattgctgaccagaacagtgttccatgcttaagagcgctagctgccaataagcaaacgattctgattccccaggtggcatacacctactcaactacggtcagccctgcagtccaagaaccacccttgaaagtgatccagccaaatggaaatcaggatgaaagacaagatactagctcagaaggagtatcaaatgtagaggatcagaatgactctgattctacaccgcccaaaaagaaaatgcggaagacagaaaatggaatgtatgcttgtgatttgtgtgacaagatattccaaaagagtagttcattattgagacataaatatgaacacacaggtaaaagacctcatgagtgtggaatctgtaaaaaggcatttaaacacaaacatcatttgattgaacacatgcgattacattctggagaaaagccctatcaatgtgacaaatgtggaaagcgcttctcacactctgggtcttattctcaacacatgaatcatcgctactcctactgtaagagagaagcggaagaacgtgacagcacagagcaggaagaggcagggcctgaaatcctctcgaatgagcacgtgggtgccagggcgtctccctcacagggcgactcggacgagagagagagtttgacaagggaagaggatgaagacagtgaaaaagaggaagaggaggaggataaagagatggaagaattgcaggaagaaaaagaatgtgaaaaaccacaaggggatgaggaagaggaggaggaggaggaagaagtggaagaagaagaggtagaagaggcagagaatgagggagaagaagcaaaaactgaaggtctgatgaaggatgacagggctgaaagtcaagcaagcagcttaggacaaaaagtaggcgagagtagtgagcaagtgtctgaagaaaagacaaatgaagcctaatcgtttttctagaaggaaaataaattctaattgataatgaatttcgttcaatattatccttgcttttcatggaaacacagtaacctgtatgctgtgattcctgttcactactgtgtaaagtaaaaactaaaaaaatacaaaatacaaaacacacacacacacacacacacacacacacacacacacacaaaataaatccgggtgtgcctgaacctcagacctagtaatttttcatgcagttttcaaagttaggaacaagtttgtaacatgcagcagattagaaaaccttaatgactcagagagcaacaatacaagaggttaaaggaagctgattaattagatatgcatctggcattgttttatcttatcagtattatcactcttatgttggtttattcttaagctgtacaattgggagaaattttataattttttattggtaaacatatgctaaatccgcttcagtattttattatgttttttaaaatgtgagaacttctgcactacaaaattcccttcacagagaagtataatgtagttccaacccgtgctaactaccttttataaattcagtctagaaggtagtaatttctaatatttagatgtcttagtagagcgtattatcatttaaagtgtattgttagccttaagaaagcagctgatagaagaactgaagtttcttactcacgtggtttaaaatggagttcaaaagattgccattgagttctgattgcagggactaacaatgttaatctgataaggacagcaaaatcatcagaatcagtgtttgtgattgtgtttgaatatgtggtaacatatgaaggatatgacatgaagctttgtatctcctttggccttaagcaagacctgtgtgctgtaagtgccatttctcagtattttcaaggctctaacccgccttcatccaatgtgtggcctacaataactagcatttgttgatttgtctcttgtatcaaaattcccaaataaaacttaaaaccactgactctgtcagagaaactgaaacactgggacatttcatccttcaattcctcggtattgattttatgttgattgattttcagaatttctctacagaaacgaaagggaaattttctaatctgctttatccatgtacttgcatttcagacatggacatgctattgttatttggctcataactgtttccaaatgttagttattatggacccaatttattaacaacattagctgatttttacctatcagtattattttatttcttttagtttatagatctgtgcaacatttttgtactgtatgtcttcaaacctggcagtattaatacccttcttactgacatatgtacttttagttttagaaaacttttatatttatgtgtcttatttttatatttctttatttattacacagtgtagtgtataatactgtagtttgtattaatacaataatatattttagtatgaaaatttggaaagttgataagatttaaagtagagatgcaattggttctcctgcattgagatttgatttaacagtgttatgttaacatttatacttgccttggactgtagaacagaacttaaatgggaatgtattagttttacaactacaatcaagtcattttacctttacccagtttttaatataaaacttaaattttgaaattcactgtgtgactaatagcatgatgctctgcagttttattaagaaatcagcctaaccatacaactctcatttccttagtaagccaaattaggattaacttctataaacagtgttgggaacaatgtttaacattttgtgccaatttgttcctgtattcatgtatgtaagttacagatctgactcttcatttttaagttccttgttacatcatggtcattttctagttttttaccagactcccatctcacaataaaatgcatcaacaagcctgaactgctgtcattcttttcatcattatcagtattttctttggaaaactgtgaaatggggtacattgtcatcctgcatttgattcatcttgagctgaatttgggtaacactaaatgttttagacattctccactaaattatggattttcttgtggctaaatgtttctggagaggtcagagttgacaaaacctcttcacaggttgctccttcttcctgaaatccttaatcctccgcatttcatgcttcaggtcatttcagggaagcctgggtttagatgcctttctgactctcagctcctgcacttctgtcatcatacctctgatactattatttatattccttccccactaggaacaggaaccacatttgtcatagtcactctcacattcctcactgcctaacagggtgcctggcataagttgggacaacagatatttgttgaataaaaatataatttgcatgtttatggagctcagctatgttctcactttttttgcttctaattccagaatatatgttaaatgatctaataatttgattattttcttataagtcttattaaacactagtcataatagacacaataaattatgccttctttttctattgccttaaaaaaaaaaa

SEQ ID NO: 1041 - DNA, 1324 bp, Homo sapiens
ctggtgaggggctgcaggtggcggcgcagtctcggtaggcggtatgagtttggctgggggccgggcaccccggaagaccgctgggaaccggctttctgggcttttggaggcagaggaggaagatgagttctaccagacgacttatgggggtttcacagaggaatccggagatgatgagtatcaaggggaccagtcagacacagaggacgaagtggactctgactttgacattgatgaaggggatgaaccatccagtgatggagaagcagaagagccaagaaggaagcgccgagtagtcaccaaggcctataaggaacctctcaagagcttaaggcctcgaaaggtcaacaccccggctggtagctctcagaaggcgcgagaagagaaggcactactgccattagaactacaagatgacggctctgacagtcggaagtctatgcgtcagtctacagctgagcatacacgacaaacgttccttcgggtacaggagaggcagggccagtcaagacggcgaaaggggccccactgtgagcggccactaacccaggaggaactgctccgggaggccaagatcacagaagagcttaatttacggtcactggagacatatgagcggctcgaggctgataaaaagaagcaggttcataagaagcggaagtgccccgggcccataatcacctatcattcagtgacagtgccacttgttggggagccaggccccaaggaagagaacgttgacatagaaggacttgatcctgctccctcggtgtctgcattgactcctcatgctgggactggacccgtcaacccccctgctcgctgctcacgtaccttcatcacttttagtgatgatgcaactttcgaggaatggttcccccaagggcggcccccaaaagtccctgttcgtgaggtctgtccagtgacccatcgtccagccctataccgggaccctgttacagacataccctatgccactgctcgagccttcaagatcattcgtgaggcttacaagaagtacattactgcccatggactgccgcccactgcctcagccctgggccccggcccgccacctcctgagcccctccctggctctgggccccgagccttgcgccagaaaattgtcattaaatgaagagatgtctagtcctcagaaacttctttcctgccctgattggggctcttgctgttccgtttcttctccctgcttctcccctttgtcatctctgatctttgcctaatctgtttctttttccttttcccctagttcttacaggtttcgttgtgttttttaatctaataaaatagaaagatccctttt

SEQ ID NO: 1042 - DNA, 2418 bp, Homo sapiens
cctcgccgcagtgggcccgcccgctggcccgtttccggtccggtgggtacaagatgacggagccgggcgcctctcccgaggacccttgggtcaaggtggagtatgcctacagcgacaacagcctggaccccgggctttttgtagaaagcacccgcaaggggagtgtagtgtccagagctaatagcatcggttccaccagtgcctcttctgtccccaacacagatgatgaggacagtgattaccaccaggaggcctacaaggagtcctacaaagaccggcggcggcgcgcacacactcaggctgagcagaagaggagggacgccatcaagagaggctatgatgaccttcagaccatcgtccccacttgccagcagcaggacttctccattggctcccaaaagctcagcaaagccatcgttctacaaaagaccattgactacattcagtttttgcacaaggagaagaaaaagcaggaggaggaggtgtccacgttacgcaaggatgtcaccgccctaaagatcatgaaagtgaactatgagcagattgtgaaggcacaccaggacaacccccatgaaggggaggaccaggtctctgaccaggtcaagttcaacgtgtttcaaggcatcatggattccctgttccagtccttcaatgcctccatctcagtggccagcttccaggagctgtcagcgtgtgtcttcagctggatcgaggagcactgtaagcctcagaccctgcgggagattgtgattggcgtcctgcaccaattgaaaaaccagctttactgaccggttcttggaaacctggagaacagccaacaagaggcccttgaatctctacgtggccactgaactgctgggcccgggagactggactacaacacctcacactggtcagctggtttctacttggtgtttggtttttcccagccccattttatcttcagcggagccgcggtgtttgttttgtgaaagcttctgattaatttattatattgacgataaaactcaaacctacccagccttccccccactccatggaagtccttgggatgggcgtctgctctgggacaccccaaagagctcctgccctctcagccctttattcaagcctcagatttctgctcatgatctacatagatttggaaactggttttcctctgttttggtctcttgggcaacatttttggcccaagtttgggcaacatttggcccaagtttgggattttggcagtagctgtatgggagaaaaagagtaagaggaaatattcccacagccatgaagggtgaaagggcaccttgtcccagactagggctgcctggtcagtcccaggtgaggccaaggctttctggccatctcagggaggggccaccaggttcctcccctcaccccatattccatcaccttcctcctctgctctgggtggtaagggaagccctcccggttcccacaggctatgatgctgcatggcagagggcaggtataacacagcactacatattggaaattttttatttttctaaataccaatgcagttttgctacggttacaattttgaaatattaactgagcctcaaaatcaccctttctgtcaagcatatcttggcctctcccatgtctcagtgttgcctgcatttctcccaggacttgggggtggggtgaaaagcgtacaaaagatacttaaaagggctcctggggtacacaagcccagcaggtcctgagtgaagccgtgggccctccaaatgctcgttttatagcaacctctctctaccctagttctccaaattcacttctgccttcctcaggtttgatatctggcaggtttgactatccagaggaaattaaatatttttatataaaattaaattataataaatattgccaaatgctttcctttagattgttccaagtctaaatgttaacctcaagctactgcaatttagacaatgaaatgggctgggtctacccccagccaccagccctcatcctctctacccagtgctctggtttatgcttgtctcctgactgctctgcttaaaggtgaaagtagcaggaacaacaacaaaagccaaccaaaaacaaggtagccagtgcaagacatctcactcttctgacatcctgcagtccccaccagtcctgaccgtgggcccctcaggggtctgggagtgtgacgttgtaatcttcatccgtctctatcccaacttcctcctgtgagacagggagacaagtgaatgagatgtcaccaggataagaccacagggaagcaaagaaggaagagagctccacttacaaagaactgcttcttgctcttggggtatccttcaagtattgcatcagacagctctgtagcctgacaagaaataaaaccacccgttttcagatgggcaaggcactgcctgtcagtttatgatattgtgt

SEQ ID NO: 1043 - DNA, 2474 bp, Homo sapiens
cgggccgggggtcgcctcccgcctcccgcctcccgcctcccgccgcccgccgcccgcgtcgccctcgccgccgttgggccgcgccgcgccgccatgtcgggccccggaccgcgggagccgccgccggaggcaggcgcggcaggcggcgaggcggccgtcgagggcgcgggcggcggggacgcggcgctgggcgagccggggctgagcttcacgaccaccgacctgagcctggtggagatgacggaggtggagtacacgcagctgcagcacatcctctgctcgcacatggaggcggcggctgacggcgagctcgagacgcgcctcaactcggcgctgctggcggcggcgggcccgggcgcaggcgcgggcggcttcgcggcgggcggtcaggggggcgcggcgcccgtgtaccccgtgctgtgcccgtccgcgctggcggccgacgcgccctgcctgggccacatcgacttccaggagctgcgcatgatgctgctaagcgaggcgggcgcggcggagaagacgtcgggcggcggggacggagcgagggcccgggccgacggcgccgccaaggagggcgcgggcgcggctgcggctgcggctggacccgacggcgcgcccgaggcccgggccaagccggccgtgcgcgtccgcctggaggaccgcttcaacagcatccccgccgagccgccgcccgcgccgcgcggccccgagccccccgagccgggcggggcgctcaacaatttggtaactctcattcgacatccatctgaactaatgaatgttcctcttcagcaacaaaacaaatgtacagcattagtgaaaaataaaactgcggctacaactactgctttgcaatttacatacccactgtttactacaaatgcttgctctactagtggaaattctaatctttcacagacacagagttctagtaactcatgttctgtacttgaagctgccaagcaccaggatattggattgcctagagcattttctttctgttatcagcaagaaattgaatccactaaacagacgttaggtagtagaaacaaagttttgcctgagcaagtttggattaaagtgggagaagcagcgctatgcaaacaagcactgaagaggaatcggagtagaatgcgtcagttggacacaaatgtagagcgaagagcccttggagagattcagaatgtgggcgaaggtgccaccgccacacaaggcgcttggcagtcctcggagtcctcacaggcaaacctgggggagcaggcccagagtgggccccagggaggaaggtctcaacgtagggagaggcataaccgaatggaaagagatagaaggcgcagaatccgcatttgctgtgatgagttgaatctcttagtgccgttctgcaatgccgagactgacaaggccacaactctgcagtggaccacagcattcctgaaatacatccaggaaagacatggagattctcttaaaaaggaatttgagagcgtattttgcggtaaaactggccgaaggctaaagctgaccagaccggactccttggtgacctgtcctgcacaggggagtttacagagcagcccctcgatggagatcaagtgatcggactgaacaggaatcctcggggggtgaacagccattccttcgtgacctgtgcacgccttctgcaaccctggagctctgctcggctagtctgactcgaaaagggcgtgactcaagctgacgggactccagtagggactttgagagcacattttgtaaaaatatttatctagacgcaaatgcttatccatgaatgtcctcttagaccatttggggatgaagccatcttaataattagtaataattaattagtaataattagtaagcattttctcaatgctctgattccatcatgttttcttaacatgataacttaaaaaattgacatcctttgtactttctttaatcttaaaaagtacacggctttttacttatttaccttttaaatatgcccctttagcaattggaacaagttaaattgttaactaaaaacagtttggaaattttatttcattcgttatatcacacccccttgtcatgactctgagtcacgtgctgctgtattgcaacgtgcaggaccattttaaacctgtgtgctaaaaattttccagatacttgctttaaagctacttttgtccacaaatgaaatactgtcacagtagacgcttaaatgccacgttttcataccaagagtcattcattacttcatgtgtcacaaactgtggtgtttggaattgggtttttcaatgagtggctttacttatcaatcacaacaggtaatagcaatagacgttagtgcaatacaaagtcaccctcaataaatactgttaattggagatgtgagtttgtacacaaaacatcagactagacctttgtatgggagagaatttactgtacattaaattctttattttttgttaaaaaaaaaaaaaaaaaaa

SEQ ID NO: 1044 - DNA, 9448 bp, Homo sapiens
ttccgaacattcttagcatcgctcgcgccgcgccgcgccgcctgagccgagccgagcctctgctgccgccgccgcggccccgccgcccgccgcgggcgcccaccaagcactttgcagactcgcttccaccctgcgggccattccgcgcggcggggcccgggcccggggcggccgcgtccaggcacaggccatgcagtgacgcccccccacccctccacctttgcccggagcgcgggcagcagcccagcgcgccagccggccccggggcaggagcggtgctaggcaggggtggggtggccgggcccagggaccgggagccggggagggagccgggcaccgagcagagggcgggggaagcggcgccgaagtttgcctcggactcgccgggcgctgcggtggctccctgggccgaggactgttgctgccgctgccgccgccgcttcattgcacattcaagtggaaaattttcaggagtcagcagaaacattgtgtccaaaaaagactgagtcgcagttaccaccaaacccaggaggagactctccctggaaaacttcccttccctttcggtttattttcttgaaaaggctccaggcttcggcttggaaaatcccaccgccaaaattgagcccagcagctggagcggcagtgagagccctgccgaaaacatggaaaggatgagtgactctgcagataagccaattgacaatgatgcagaaggggtctggagccccgacatcgagcaaagctttcaggaggccctggctatctatccaccatgtgggaggaggaaaatcatcttatcagacgaaggcaaaatgtatggtaggaatgaattgatagccagatacatcaaactcaggacaggcaagacgaggaccagaaaacaggtgtctagtcacattcaggttcttgccagaaggaaatctcgtgattttcattccaagctaaaggatcagactgcaaaggataaggccctgcagcacatggcggccatgtcctcagcccagatcgtctcggccactgccattcataacaagctggggctgcctgggattccacgcccgaccttcccaggggcgccggggttctggccgggaatgattcaaacagggcagccaggatcctcacaagacgtcaagccttttgtgcagcaggcctaccccatccagccagcggtcacagcccccattccagggtttgagcctgcatcggccccagctccctcagtccctgcctggcaaggtcgctccattggcacaaccaagcttcgcctggtggaattttcagcttttctcgagcagcagcgagacccagactcgtacaacaaacacctcttcgtgcacattgggcatgccaaccattcttacagtgacccattgcttgaatcagtggacattcgtcagatttatgacaaatttcctgaaaagaaaggtggcttaaaggaactgtttggaaagggccctcaaaatgccttcttcctcgtaaaattctgggctgatttaaactgcaatattcaagatgatgctggggctttttatggtgtaaccagtcagtacgagagttctgaaaatatgacagtcacctgttccaccaaagtttgctcctttgggaagcaagtagtagaaaaagtagagacggagtatgcaaggtttgagaatggccgatttgtataccgaataaaccgctccccaatgtgtgaatatatgatcaacttcatccacaagctcaaacacttaccagagaaatatatgatgaacagtgttttggaaaacttcacaattttattggtggtaacaaacagggatacacaagaaactctactctgcatggcctgtgtgtttgaagtttcaaatagtgaacacggagcacaacatcatatttacaggcttgtaaaggactgaacatggttatttatatatatagatatctgtatatacacacacacatatgtgcacacacacactctctctccattatcgaacgactgactgtaaacctcaccacacagggtggtgccctggccccgaggtcaccccgacttttctaaatcttgtttgagtgaagtcattttttcatgtgttcatactatcattgtagctgtgaagttctggtacagttgtaaaaagagaaattgagttgtttctctatgttcttcagatgtgcagcccacaattcctcgggaaaggtgaacctgaacaacccaagtctctctctgcagagccctgtttctaattgtggtagaaaatattgagacagagcatttgccatgggacatttacagcctttatacaaatgtatttagttctcttttttccaacataaaattcttgttttaagatacaagtaaaattaatctttaaatataaatgtaaattagtacacaaaactaagaatctttagacttatctttgtaactaattagggtggaagttatgaaagaatgtaattcactaaattattttttaaatgaaacctttttttttctttttgaaaccaaatgttaaactatagccttaagaaatgcttggtagaagtgtcctaatgagacaaatttgtacttttatcctcaaggttaacactaatctcctaatccattaaactcttgaacaggtattacaaaggaagaaaacttcaccccttatccttaacatatatagtatatttaaaaaatataaaattgtattgtactaatgtgatgatggattatttaatgaaaaagaaaaaatggctctttttgcaataagtagatacatactgaaaaaatctaaacttacaatgtttatagtcttgtgtgtgcagttatattttatatggacgaccaaattttttattaagatgagtaaatatttgaaccactgaattttaataacaaaattttaaaattggcatgaatacggaatactgcactgtgagatgcaaagtatacagaatctgtggctgggagaaaatttcatcaaatagacaagtaaaaggctcatcagttttagcatctctgctccccagaaaattgtaagcatcctcaccagcctgtggatacattctttatttctagtgacccaatatgcatattaacctgctataactagggctatatgtgtaggtatgtgtatacatatacacaaatgcacatatagagttaacacatttagtgaacacttgtttagtgtcactcagtttgctaggtgctgatatgtacgtatatctcaatgtgtctgtagacttagatacatcctcttgaagcacatccatttctttagcgtctctcagtaagttacagtacttgtttgacttaggtttaagaggcccagctacctatctctgaccttttcaaataggctcatttgggagattcttttgccaggagagattcaactttccaatctaagtattccagagcattgcccaggcagagttggtttgatgtggccagatgttttgagttatttcccttaagtgtttcactggggagagaacagggagtgctcctccagcttcccaaagaaatatgtttttgtaagtggtaggaacatgtgcacacaatagaacatgaaataagttttttaacttgtaaaacatgtcaagatttttccaccaagctagaaaataaaaaacttagttctaccacatccaattaacttacacacccccttccctgtctcaacacctgctttgaccctgcttttctattattacatcagtcagcatcttgtggtccctaacatgaggatgtggctggctcgtgggaaacagcaaaacactaagcctgacctctcccaaattgggaagaccagaggagaaagtgcaaaactgtccccatttggaatgcccattccttctagaaaccagttggacagtgctcctctgcccttcataaacagactactgttgggtccctgattccaggctggcctgtgaaggattgccccaggtgtcccctttcacggttgtcacatttacagtgacttctgttgaacacccctcttagggatgtttcttttgctcttatttcctgcatctttccttaagggaagccccatcctctcccaggaccaggagtttatgaccaggcgagcacaaatggctaaaagccaagctgtcctagaacttcagtgggagagctgtctggttcatattctacccaggaatggtacttttcagtgcagccaggagggctcttgggatttcctttccaaagcacaaaaatactgggacccaagaagaacagctagaggacaactctgttggcacagagacggggacagcccagtctgctgacctcacagggtcagctgggcccccctggtgcttcaccacctgcatcctcttgctcagaatgcctttgcagttgagttttctgggtttctatgattgaccttgaggtttactccttgctcttacaacatttctaaggatttttaaaagtttacttcttgtcttgttcttctaaagctttctccaggacagatattttccctgtcttaaccactggtccagtcatcccagtgggcttctctttgtctctcccagattagacctttgggtgagattggcatcacaacatctaatctgagtctgtcttttgtccttcattctgtatggcagtctccctttgttataaaagctttctaaagcatactaaagaagccttcccagagccccgtcttgcttctcttccaggtgctctatcccctcgagaccctctggtgccaggcttgcttcacggccatcttgtgttgtcactgcagagtttggaggccagttttccacagcctaaacagggaggagctgcagaatggggctctggtctctgggcattcatttccctcatagaggctgagaataaaacaaggacttattcacacatgttctagaaccccagaatggcccaagttacctgagaccagggtttctcaaccttgacaccattgacattttggactgggtaattctttgttctgcagagctgtcctttgcactgtaggagatttactaatatccctggcctctacccagtagtaccactagcacctattccccacccagcgtgtctccagatattgtcaaatatcccatcgggtgcaaaatgatccctggtcaagatctgttgcccaagatgttacaggtcacaatgaccacatttgaaattgttttccctttcattttaccctgtgaaagcatctctcctagagccttgcaagaggcaggtgacattgtgtccatatttcttcctgtttcagaacttctgtttcacaacaatttctctctcgctacaagtattctttcactcagcactggggaagttgggaacagctggtcaccatcatccctttaatcaactcacacctgtttaaagagtgtttctgatttgaccttcatcccttagtttactggcgttaaaaaaagtctcagcaattttcattatttctcgtgggtctcattatcaaacctttacttatttcggcatatttcctctgggcttcttctagtttctgccttacaagcaatgctgttctgtaaatttattgaaacctctggaacatttcacctttagagatggaggatggaaggattggtaccagaagagggctaagatacgttttctgtcttgagctgaaagcacagtctactctccttcgttttgtcgatgagaaagttgaggccagaggggaggtgacatgtttagagtcacccagctggttagtgacagaaaaagcgtgagagttgtctaggattcctgccactttggtccctggcctctcctgggggaggctgctgttcttaggtgctctaagcttaatccctcagaatgtgtggacaggtcagcttagaagagatggggagattcaggatccccctgtgccagagcacagcctcaccggatgctgcttcccacactgaagtgtcctgtccgaccattgctatctgaggcatccacaagcaggtaggaaagctggcgagccattttacttcctgaggacaattccccagccacaggctctgagtcaaatttctatttggtaagcatcctagcagcaaagtcctgcactcagaccagccaaaaaacagcccccattccaagtacttggtgtcaaaagtccccgaacgacttttaaacccaagtcttcttaaggtttcagtactgtggtggctttagcagttgtttttgtgcaactataaattatttaaatcatctgagatgacagtcaattttacaaaccaggtacatattaatttgtataattttgtatatgctctggtacactacctgaactaacgaagggtagaactaattctgtttgtcagtgttcacacctgtaacattaggaggatatgtctgcattgcttatttctttatgttggtgtttctgtggcaaagccctgcacatggcatttctgaaaagccttaaatctttaagatgttgcatgtagggtatgcagtgcaaaaggctgcctcagaactgtgagcccttttgtaagctggaagcatttctcttactactgttacttttgtaggaagttttcaattcagagctgccaaagtgttcccgtaagcagtgccttagtaataccttagtcatgccgccagccttttcttacaccaattcctaatgttcatttacgaattggcccaatattggaaacaaaacaagcaaaaattgtcttcatttttgttttgtaagcccattttttctccagttctataggaaactgactgcttggtgtaaaatccgaaactggacacaagtcagttctttcaccacactcaaatgtatataccaaaacaaaaggttgcaacttcatagtttactatgaaaagcaaattgtactttttaatgttgccttttaaattcatgaccaaatacttagctatttgtgaatcttctgcactctagcatgaaagtgcctttggtttgagattccagcttagaaaagtgctgccataataacgataatttgtagagagaccaaaaatattttgagatcaccgtaatgcctttggtttaccgggatgagtaaccaaccacaggcctctgttcacaagagcacgacgtggtccccgcctgctgctagtctgtctgccactgggggcctcccaacatccatagcacacttcagcggaaggaccccagaaactgttgtgtttgtgtgtgctgatgacctagtgtgtcatttcacctcgtcacccagccctgcgtccggatgaggggacttctgcacaaatgacagaatctcggctggtggacagatactacagctttctcctcctccttgtgttcgtgttcagtctctgtggagactttcttttccattcaaatgacagtgcgcacttatctggtttacacaatgataccattttgaaagttggaagcctcaaactgagacgacagtgcagaacaaaacaaaagtgagttagggtcgttaaaattgaagtgttcttcttagggcaaacatgttgactccgagtattgtgtatgaatgtgctacgagaaacttccaaagagcaccattcacaatttggcattttcaaagaatgttccagccctcaaaggggcaactctttaaagtccttgttggcttttatccaaaccttgtagaaattgggaaagctgatagaggtaaggaagacgagtgaaaaggacaagaaggccaaacaccagccaaaaagaaactaggaaaaaaagattttctttgctaatatagatgtaaaaataacatcagacatctttgaaaattagcctctaaactcttaatacatacgttctgtgtgtctctacctggcgtctttaagaatatcctctctgggctctgaaattttaggagtgattcttatccactccaagttgtaagtatttgtagaaatttgtgcaaacaaacaaaaactatcaaatgaaaagaaaatgtactcaacctaacttatagttagcagctggaattctcaactcttccctgccagcactataccacagtgtggaagaaattagtcaaatgcttgttttcctgcttctcttttcaactgttactgtgctttgtttgaaagtagttttctctctcaaagccgttgcttatatcgttaagaatgaaggtttgtgtttaaaatttattgcattgcaaagggtagtttcactgaagtcatgcaccattaaataagatgaaatatttgtatttattgtcctacttcctaagccgtaacttcttttcctctgtgaatttgcattgagtcactcatgctacactacatcgctttagtatttgagatggcatttatgtttcctctcgtttatcatgaaatggggtcagattccatcagattccacctctgtcaggtggactcttgtctgccttccatgatgagattttttttctccttcccctttctttaagagaggctgacagatctaggtgtcaatcaattggaaaccagtctctgattttttttcattagttattttctatcattagtttcactgtgtaaattagatatcaactgcacttctttaaaaaaaaatacatctccctattacctccttgaaagatttacttctgtaggcctttttcaataggctcatgactgcagacaaggaaaaaaaaagtaaaaacaaaaacagtatgtgcctgaaaatgacaaaaaaaaaatttgtaacatttaaaaaagaaacctgaatagcctttaattctttaataatacacttaaattttatgtaaatcggttttcgccacgtgtgtttgttcacattctaaatgacttaatgggattctcacggtctgtgtctttgtgtcacgtgtataaaatgggcttgtgatgtaagcgtttcatctggtcagtggttcctttgatattgtactgctgctgggagtgggctgtggaacctgccttcgggtaactgggttcctcttgggtagattggagagatgggggtgggcgtgggcaaattctcacacatgttttcttaacctatttgcagaaactttcaaaaggcatttgattaaacctcttggcagtacagtattcttgtatttgttaacgtctgtgtttaggtactggtacctttttgttttaaaatgttctaagtgttggctttaaagtgaatttatctttagtatgatagttatatgaaaattataggatttgtgtgcagagaatttttttataaagtgctttgtaaaaaaaaaaaaatgtattctagcttttgcggtacatatgtgtgataactttaatacccatgacagttaagtgcaattatttcatcactctaaaaatgctatttttgtgtcagttcctgcaggtgttttcatgtctttgcaaagtgacacattttgatgccttcttgataaagtggtagacattttgtagctttctagaaactttgtattcatacggtatcaatgaaaaataaagaaaatgaaagtgtgggtcaccttttttatctgcaaaaaaaaaaaaaaaaaa

SEQ ID NO: 1045 - DNA, 2220 bp, Homo sapiens
cccacttttcccaaacaaagctcccggcaactttctccctcgcagcgccccgcccgcccgcggctccccagccccaggccgggaggcccagatgggggaaccccgggctggggccgccctggacgatggcagcggctggacgggcagtgaggaaggcagtgaggagggtaccggcggcagtgagggggctgggggtgacgggggcccggatgcagagggggtgtggagcccagacattgagcagagcttccaggaggccctggccatctatccaccctgcggccgccggaaaataattttgtctgatgaaggcaagatgtatggtcggaatgaactgatcgcccgctacatcaagctgagaacggggaagacccgaactcgaaaacaggtttctagtcacatccaggttttggcccgaaggaaatcaagggaaatccagtccaagttgaaggaccaggtttccaaggacaaggctttccagacaatggcaaccatgtcctctgcccagctcatctccgcgccttctctgcaggccaaactgggtcccactggtcctcaggcctctgagcttttccagttttggtctggaggatctgggcccccctggaatgttccagatgtgaagccattctcacagacaccgttcaccttgtcactgactcccccatctactgacctcccagggtacgagcccccccaagccctctcacccctgcccccacctaccccatcgcccccagcctggcaggctcggggcctgggcaccgcccggttgcagctggtagagttctcagccttcgtggaaccgccagatgcagttgattcttaccagaggcacctgttcgtgcacatcagccagcactgccccagccccggagcgccgccgctcgagagtgtggacgtccggcagatctacgacaaattccctgagaaaaagggtggcctccgagagctatatgatcgtggccccccccatgccttcttcctggtcaagttctgggcggacctgaactggggcccaagtggtgaggaggcaggggccggtggcagcatcagcagtggtggcttctacggagtgagcagccagtatgagagcctggaacacatgaccctcacctgttcctccaaggtctgctcttttggcaagcaggtggtggagaaggtggagacggaacgggcccagctggaggacggcagatttgtgtaccgcctgctgcgctcgcccatgtgcgagtacctggtgaatttcttgcacaagttgcggcagctgcctgagcgatacatgatgaacagcgtcctggaaaacttcaccatcctccaggtggtgacaaacagagacacccaggaactgctgctctgcaccgcctatgtcttcgaggtctccaccagcgagcgtggggcccagcatcacatttaccgcctggtcagggactgaagggggaccccaaaactggctcaccccccagaacaccctcctcccagggagggtcctccagctcacctcatgcttcttatttggggagagggctgtgatgtaaaggggttgacctcagaggcctaagcaactggggccatcccccccattagaggggcccccaaaacttggttggagagctgaacaggctgggactgaggaaaggataaaccccgatattgggacctcacagtgggtgtctgaaaggacagatcactccggagtatcagggattgtggggacaggagtgagacaaccccccaggtacagcactggcttttcttttcagcccctgacaggccacccccactcctctgcatgtcttggagagcgctagttacacattggcttgtcccctttactttttcccagccacccctccccctgaaatttctgcccctctctaccaccctcactccatgacctgtgagatcacaaagtgaagatgaaccctttctgtgcaggagcagagccaggtgggccctggacattttttttttttttaatataacgagatatttataagtgggtgctagggtcttgactttatctccgctgcacaagcagtgtgttgaactttctaatctcatccctctcctaagtgagccctgagctagacggtttccttcctcccctctcaaagtttgtttgtttgtgttctgacagaggataaagctattttaccaaaaaaaaaaaaaaaaaaaaaaaaaaaaaaaaaaaaaaaaaaaaaaaaaaaaaaaaaaaaa

SEQ ID NO: 1046 - DNA, 3023 bp, Homo sapiens
tcctcaacacaaactttccgtcccgctcgctccctcctccgcgctcggcgcctcccgctccagcccggctcattccgcacattccggccagccccctccccacgaccccccttccccggccccccttgcggctccctcgggcccggcggagcggcccggccggagcgcccccgcgagctcggaccaggctcagccgcccagtgggctcaggcccagagcccagagcaaccagcacaatagcgtccaacagctggaacgccagcagcagccccggggaggcccgggaggatgggcccgagggcctggacaaggggctggacaacgatgcggagggcgtgtggagcccggacatcgagcagagcttccaggaggccctggccatctacccgccctgcggccggcggaagatcatcctgtcagacgagggcaagatgtacggccgaaatgagttgattgcacgctatattaaactgaggacggggaagactcggacgagaaaacaggtgtccagccacatacaggttctagctcggaagaaggtgcgggagtaccaggttggcatcaaggccatgaacctggaccaggtctccaaggacaaagcccttcagagcatggcgtccatgtcctctgcccagatcgtctctgccagtgtcctgcagaacaagttcagcccaccttcccctctgccccaggccgtcttctccacttcctcgcggttctggagcagcccccctctcctgggacagcagcctggaccctctcaggacatcaagccctttgcacagccagcctaccccatccagccgcccctgccgccgacgctcagcagttatgagcccctggccccgctcccctcagctgctgcctctgtgcctgtgtggcaggaccgtaccattgcctcctcccggctgcggctcctggagtattcagccttcatggaggtgcagcgagaccctgacacgtacagcaaacacctgtttgtgcacatcggccagacgaaccccgccttctcagacccacccctggaggcagtagatgtgcgccagatctatgacaaattccccgagaaaaagggaggattgaaggagctctatgagaaggggccccctaatgccttcttccttgtcaagttctgggccgacctcaacagcaccatccaggagggcccgggagccttctatggggtcagctctcagtacagctctgctgatagcatgaccatcagcgtctccaccaaggtgtgctcctttggcaaacaggtggtagagaaggtggagactgagtatgccaggctggagaacgggcgctttgtgtaccgtatccaccgctcgcccatgtgcgagtacatgatcaacttcatccacaagctgaagcacctgcccgagaagtacatgatgaacagcgtgctggagaacttcaccatcctgcaggtggtcacgagccgggactcccaggagaccctgcttgtcattgcttttgtcttcgaagtctccaccagtgagcacggggcccagcaccatgtctacaagctcgtcaaagactagggtgccctctgcgcctccttaaggatgcagggtgagcatctcctctccacacctgcctggcacccctgggggggtccaggattgaggattcatctacctgccaggcctcaggcccaggacccaggaggcctccccacctaccccagcacacacactccctgccactgttctgcgctttaattgtgggagaagagaggagaggagggctcagcggtggggcagcctgtccggggcgctgacccaccatcaccctgctctgcccagcctcgcgtgacctcagagaggtggggataggggacaccttcagcctccagcatgtgtggccactgtacccccacccacccttgggggagcatgatgggcaggtgagggcaggatggagaccaagggagtcagtgagcagaggccctgggagtgtccggttggggttggactgaggacagaggggcccacacttccttgcccctttgtgtcccaggcctggtgcccagactccttgcatggcttgtgtggtcctcagactccgcacagcgagcgtaggtctctgggtttcagatgaagtgcccaggctccaggaagttgagggacccacaggagaggtgggcagagctggagttctcatccagggctgcttgtccccagagcccaggtttatactacctccctggggcgggggctggccgcagggtaggggagaggctctgcagtgtggagtggagcctcatcgaggggcgctgggttaggggagcacctgtttcagactgggcatgaagaagggagcacagcagctactagaccccattagcacctcattagcccacaagccagccaggggccccaggaagatggggcaccccccagcaccctccagattgagagcaaggtagaggaaggagtcccagcctctgggcagaccagaggcccagagggagagagtagcagaaggcttttgatttttctcttgcctgaggcttgaatctgacaaacccttggtgggcactgctcccttaggttcttccccacctcaatctacctgcctagagtagcagctcccagacccagttctgggactgaaggttaacccttcacctgctgtcccttcttaacacccaggcccccagagccagctgggcctgtccagcagccacctgtgggtatttatgagtttcatatgaagtactgtgccccttcccttcctcatcccgaccctgcccgagcttcctgaaggtcctcactgtttgcatatcgctcaggccacctccaaaccccacctaggttttataatgtatattatatatttttttgtgtatttttaaaatccagctgtgatgggttatatcataaatgcagcttggggttggagcaggggccctcaaaggcccagctcctgctcaaaaaaaaaaaaaaaaaaaaattaaagttatttgtttgtgggtcagtcatgtaaaaaaaaaaaaaaaaaaaaaaaaaaaaaaaaaa

SEQ ID NO: 1047 - DNA, 1780 bp, Homo sapiens
gtggccccgccgccactccctccggctccctccctcccgccgcggcgcgcatctcattccagccctcattccgcgcattccagcgtcctcctcgcacactcgaggccagggggcgggagggccgcagctccggcgccgccgcgtcccgccagaacgatcgccgcggccggaagagttggcgctcggggcggactccttggaactggcttagcgcacccatcccaccttcccgcaccctgggaccggtccaacgagcgctcctccaagcggagccttggagggcacggccggcaccattacctccaacgagtggagctctcccacctcccctgaggggagcaccgcctctgggggcagtcaggcactggacaagcccatcgacaatgacgcagagggcgtgtggagcccggatattgagcagagtttccaggaggccctcgccatctacccgccctgtggcaggcgcaaaatcatcctgtcggacgagggcaagatgtatggtcggaacgagctgattgcccgctacatcaagctccggacagggaagacccgcaccaggaagcaggtctccagccacatccaggtgctggctcgtcgcaaagctcgcgagatccaggccaagctaaaggaccaggcagctaaggacaaggccctgcagagcatggctgccatgtcgtctgcacagatcatctccgccacggccttccacagtagcatggccctcgcccggggccccggccgcccagcagtctcagggttttggcaaggagctttgccaggccaagccggaacgtcccatgatgtgaagcctttctctcagcaaacctatgctgtccagcctccgctgcctctgccagggtttgagtctcctgcagggcccgccccatcgccctctgcgcccccggcacccccatggcagggccgcagcgtggccagctccaagctctggatgttggagttctctgccttcctggagcagcagcaggacccggacacgtacaacaagcacctgttcgtgcacattggccagtccagcccaagctacagcgacccctacctcgaagccgtggacatccgccaaatctatgacaaattcccggagaaaaagggtggactcaaggatctcttcgaacggggaccctccaatgccttttttcttgtgaagttctgggcagacctcaacaccaacatcgaggatgaaggcagctccttctatggggtctccagccagtatgagagccccgagaacatgatcatcacctgctccacgaaggtctgctctttcggcaagcaggtggtggagaaagttgagacagagtatgctcgctatgagaatggacactactcttaccgcatccaccggtccccgctctgtgagtacatgatcaacttcatccacaagctcaagcacctccctgagaagtacatgatgaacagcgtgctggagaacttcaccatcctgcaggtggtcaccaacagagacacacaggagaccttgctgtgcattgcctatgtctttgaggtgtcagccagtgagcacggggctcagcaccacatctacaggctggtgaaagaatgagagactcggggagcagggaggggggaagagacgtgtgtgcaggaaacggggacgtggggaggggacctgcaggggcagccccctgaagtgccaagagagctgagaggagcagttgtgactctacccaggaacaaactgtgcctgaacctgaggtgcccaaccccaaataaacccaagatgctgtgtattttcagaggaaaa

SEQ ID NO: 1048 - DNA, 4382 bp, Homo sapiens
cggcagctgcagcgggtcgcacggctccggcccatctcggggggcgggcgggggaggcgaggtgcgcgagccgagtccggggcacgatgtccgacgcgggcggcggaaagaagccgcctgtggacccgcaggcaggacccggtccggggccggggcgcgcagctggggaaaggggcctgtcggggtccttccccctggtcctgaagaagctgatggagaaccccccgcgcgaggcgcgcctcgataaggaaaaggggaaggaaaagctggaggaggacgaggccgcagccgccagcaccatggctgtctcagcctccctcatgccacccatctgggacaagaccatcccatatgatggcgaatctttccacctggagtacatggacctggatgagttcctgctggagaatggcatccccgccagccccacccacctggcccacaacctgctgctgcctgtagcagagctagaagggaaggagtctgccagctcttccacagcatccccaccatcctcctccactgccatctttcagccctctgaaaccgtgtccagcacagaatcttccctggagaaggagagggagactcccagtcccatcgaccccaattgtgtggaagtggatgtgaacttcaatccggaccccgccgacctggtgctctccagtgtgccaggcggggagctcttcaaccctcggaagcacaagtttgctgaggaggacctgaagccccagcctatgatcaaaaaggccaagaaggtctttgtccccgacgagcagaaggatgaaaagtactggacaagacgcaagaagaacaacgtggcagctaaacggtcacgggatgcccggcgcctgaaagagaatcagatcaccatccgggcagccttcctggagaaggagaacacagccctgcggacggaggtggccgagctacgcaaggaggtgggcaagtgcaagaccatcgtgtccaagtatgagaccaaatacgggcccttgtaacccgtgccccccgcccgggcggggtactgcctgcacctcagacctctgcctgggggctccctgtaacccctcacacgcgtggagacttatgactcgtcgtgggcgcatggcggcgcacctgctgcaggagcggccacgtctcagcttcattataccatggcctgcgcacgtggcgacgtccctgaggggccagtctcctcactggtggggaacgcaagagaatctgcgtagatgggtgactcagccttagtttctattcttggatgtcccagttgaatcagaaggggacctctggagtacacacctctctcctgggcgctcagggtccctggactctccctcagtctccagcctgggctgccgagggctatctctgcagaatgagttgtgatcattgtcaccctatgtcttctcaggtagcagggcgcgtttccacttaaggtgtgtctgtcacgcacctcattctccccagacagtctttgagtaacatctgttcccatcttccttggaagcaggacacaccagctcctccgtcagtgtctgcatgggtagcaggctgcaggagtggggtctctgcacagcctgggatggggcttggggctggggcctgcagcagaagtgtgcccagcgtttctcggctcccgcaccccttttcccttatggctctgaggccatcggctgtctctgcatttcattggctgtggaggagagactcctaggatggctgctgtctgagccatgagtgccagggctgagagaggcctcttcatttcctctccaggctactcagaggccatgtgaagctcgtttgtcccactagaccaggcctctgggcctgctctttctttccacccaatgtccagtcttggatcatagatttaaaaggaaaacccctcttatctaggaggctttaacttcctggaccccaggattcaccttcctagtggtgtttagaaaatgcctccacagcccccttccaccatgggcatgagagctggggtgtgtttcttgagaagctcccttttttcttgctctgctcaccggtgtggcctgggctggagtgcactctccctgggggcagctggggcctcgcaattcttgcttcaggatctctcccatgcgagctgcccggagggtgtcagcagggcaagacacctagtctagagtcaccaaggtcacagtgccactttcacgggatagcaggctcttgggacttttacacaggcctagggtcccctcagtcttggtcccaggagatgggggccactcgtgaggctggccatgctgtggcttctcacagctgtggtctcccctgcctcacaacgactcctttctcttgtgtggcgggactcgcccttttgctgtgctcagaagattcactgaggaaactcatggaagcctctgctcatttgggtcactgggacacccctgagatgggtgtgtttatttgctcagggcgggcagcctatggtgaagaggagacagaggcgatgggcgtgcttcgtcctccgtaacactggctttatttaccgtggtggttcagagtcccaggccctgacctctaaagacttttcataacagacgttaagaccaagccgtggacctcaccccaggggaatgccacggccctttggggacctgcacacccacctctccgggggacttgacaaggggccctgaggccaagggaggtcactcctccctccaggcccctgacttttactttgtggttctctaaaaaccatgtacacactttcactctattgtaaccacacagggcaggcgcatccagcatgtcagtgtcctgccccgggcagctctccctcccgggcacgctccctctggcctggtggatcaccaagagggcggttctcattttgttattagtggaagagccttgagcttaaaagctcttcattttctttgccggaaagtatatggtttgtgtttttgcagttttatttttttaaggatggacactaaatctctggtgtccatgttccgagcccggtggctgggatggtggctcgatgtgtctcctctttatcccgccctctgcctgtttggtgccctcccttctttcccccaggcagtgggtatcgggttctttcccaaagtgcttacttggaaagagtgtggctgctggactcttttcgaaatgcccctctgagtcaggagcctggtggggacaagatggaggatgtccacagaggctgacctgtgggggaaaagaagtgctcaggtaaggttgtctcctctcctgtcctaaaaaaatccatgcttgcaggagagggttggtgcctgctcagtttctgtcgagggaatgggagtctcctcggctccctcctgggccctctgcttcttggaggccgaccgctggagactgcggctcctgtgcttggatctttgacatctgtcagtcactggaggctagagaagttgactttaccttggctttctgtgggttcccgatgggcttggaagtgccgtctacttcctaagcatcctgtctaaagctttgtggcaccctcagtgcaacctcagaacagacaaatcatgaatgagctggaactttgcaagaatattcatattataaatgtctcatctgatggaggaacgtgtgcatttagagagagggagagttttcaaggtttatggcaactttgtggaggacctgggtaactcttacccttggccaaaggaagaggttttcctgtctggcttctgaggttggagggggcacttagcagtgaaccttaagtctgggtacatgtaaccctgctgaggggctgtgcaggccgctcctacggtcctttggcctgaggcagggcgggaggcatgcaagccagtgggggaaaacccctctgaagctgggcagccctctacctgggccccgggagccgtgctccttggaacgcaaagggccgaggagcatctggttttcatggcaaagctctactccagagctcctttaacatctgctaattaagtgcaataaatttttctagaaaatggcaaagatgacttccaggtggatattgctctcttacggtgttggggatgccagaacaccacttggttttatttttctaagtgcatgtgatgtgatagagtgtgtggggctctgtgtccttccctgggagctggcattccagcgggcccctctctttacctttgttgggggaaggaggcaagagagaaattccttcttcccagccagagagggcagaagcagaccgtagcccattggccttatgtgcgtgtgtgcgtgcgagtgtgtcactgctggtgggccggagtgatgtggtgggagggaagccgggaatgtatccttttcagacaaaattaaatattttgaaatgagaaaaaaaaaaaaaaaaaaaa

SEQ ID NO: 1049 - DNA, 1670 bp, Homo sapiens
gatttcctcccacgcgaccttccagttctcggagccaggttaggggtttggcggaggaggactgcggggcgcgggcctagggccccagcagccacggccaggggagcgctcaagacagaaagccggtggcttcctcacctccacctgtaatgcaggagggagaattggctatttctcctataagccctgtggcagccatgcctcccctaggcacccacgtgcaagccagatgtgaagctcaaattaacctgctgggtgaaggggggatctgcaagctgccaggaagactccgcatccagcccgcactgtggagcagggaggacgtgctgcactggctgcgctgggcagagcaggagtactctctgccatgcaccgcggagcacgggttcgagatgaacggacgcgccctctgcatcctcaccaaggacgacttccggcaccgtgcgcccagctcaggtgacgtcctgtatgagctgctccagtacatcaagacccagcggcgagccctggtgtgtggacccttttttggagggatcttcaggctgaagacgcccacccagcactctccagtccccccggaagaggtgactggcccctctcagatggacacccgaaggggccacctgctgcagccaccagacccagggcttaccagcaacttcggccacctggatgaccctggcctggcaaggtggacccctggcaaggaggagtccctcaacttatgtcactgtgcagagctcggctgcaggacccagggggtctgttccttccccgcgatgccgcaggcccccattgacggcaggatcgctgactgccgcctgctgtgggattacgtgtatcagctgctccttgatacccgatatgagccctacatcaagtgggaagacaaggacgccaagatcttccgagttgtggatccaaatgggctcgccagactctggggaaatcacaagaaccgggtgaacatgacctacgagaagatgtctcgtgccctgcgccactattataagcttaatatcattaagaaggaaccggggcagaaactcctgttcagatttctaaagactccgggaaagatggtccaggacaagcacagccacctggagccgctggagagccaggagcaggacagaatagagttcaaggacaagaggccagaaatctctccgtgaggggcaggtggactccaggcacccggtaccgatggggcagggaccgagtctcccatgaaggcagactcctcctcccagcagagcagcaggatccccagccagactctgtacccacaggattacagccattgcttgggaaggctgggaggcctcccatccaggacactgggggcaggagtgtcatcttttgggcagggcaatcctggggctaaatgaggtacaggggaatggactctcccctactgcacccctgggagaggaagccaggcaccgatagagcacccagccccacccctgtaaatggaatttaccagatgaagggaatgaagtccctcactgagcctcagatttcctcacctgtgaaatgggctgaggcaggaaatgggaaaaagtgttagtgcttccaggcggcactgacagcctcagtaacaataaaaacaatggtagctgaaaaaaaaaaaaaaaaaaaaaaaaaaaaaaaaaaaaaaaaaaaaa

SEQ ID NO: 1050 - DNA, 3351 bp, Homo sapiens
gcggccgctgcgactccggagccggcggggggctccggtccttccctgcgccaccgcacaggacatctctctggctggggagcggcggtgagacccgccgagggcgtctgtgtccctcctcccccgcggtcctcggtgcgtccgcacgcccctcctcctcggctccctccttcttctctccgcgcctctccgccccctccccgtctccgcaggccgagtggtgcggcccgcctccagctgaccggcctggaatcccggctccgagccccggactcgcgcccgcccgcgcgcccgctccttccccctccccccgccccgagccccccgacgccgccgccaccgcctcctcagagcggggcccgggcccagccgccgccaccgctgccgccgccgagctccgccgccgccgagcaccatgggagacgctgggagcgagcgcagcaaagcgcccagcctgccgcctcgctgtccctgcggcttctgggggtccagcaagactatgaatctctgttccaaatgctttgctgattttcaaaagaaacagccagacgatgattccgctccaagtacaagtaacagccaatcagatttgttttccgaagagaccaccagtgacaacaacaatacctcgataaccacgccaactcttagtcccagccagcagccgcttccgacagaactgaatgtaacttcaccgagtaaagaggagtgtgggccatgcacagacacagctcatgtctcattaatcacaccaacaaaaagatcctgtggtacagattcacagtctgagaatgaggcttcaccagtaaaacggccacgactacttgagaatacggaacggtccgaggaaaccagtcgatctaaacagaagagtcgacgtcggtgcttccagtgccaaaccaaactggagctggtgcagcaggaattgggatcgtgtcgctgcggttatgtgttctgtatgttacatcgcctccccgagcagcacgactgcacattcgaccacatgggccgtggccgggaggaagccatcatgaaaatggtgaagctggaccggaaagtggggcgctcctgccagcgcatcggggaggggtgctcctgaaggccaggcatggccaccacgtgacgctgttcttagttcactaatgttagccttatttaggacaaagtcagccagacaccttgtactgggcacgcgtcagactgcagccagtccgtttcctttctttagccagccatcctggtactgtagtttaggggttgatggtggttgaaattgatttctggctggttactaaggtgcctgctagccattgtataaaattaaaacatgaagaatattttttttttgagcatggctagtggatttaaaacaacacatacctgtcactgctggagtcaaacttataaaaagccttaagtggaaagtgttccagacggagactctgagttaatagaggagtagaagctggtgttaaagttcccacgacgcacatggctttgccagaaactctgtttaatgatcggcctttcacctcttcacttatccttagtcccagtagccaggatacctgatggccacgtgtgccttggccacgggaggctgctgagattggccacgtggctgggctgggtggtggcctcactctcccacagagctggaaatggggggtgggggacagattcttacggaaatttttttacctgacttgctatgaaaaaactcatcacacaagaagagaaacagtaacctcactttgaaaattagctccactcaagactagtccacgaacgagacccgccttttctacacaggatccaaggtcacgagaagcagccagagtgccccgcctccgccggctctggtctgccattcgccagtgcagggatctggcacggaccagatgtggcgaatggcagcacagcgcggtggctgggtctgcacactggcctctgcagccagatttctatattgggagttttttaaaaagacatttcatagccaacaagaatcagtagaagtgctgggagcagcagctggggaagctgccgcccacgggctctgccccttccagctggagccgcccgtgcctccaggggccaagaggatgatgtcgtggcctccattctcgtttctatgcagccccatagtccaaggacacccagtccacatctaccatatagcaagtttagtaagggaaggcagcatacgtcccagggacagtgggtttggatctgtctagaacagcggtttgtggctgtggcccagctccgagagtgatatttgctctggtaggtgagggcctgagggtacatttctccacctgtgccccctcatgttcacagaggatttcagcagctgcaactgcgcacgccaggtggggaagggtgggggtgggcctggttgccccatgttaggaaatcactaccagtcaggtggggctggggctgggtggacaggatcaggattcccttgaaagcccaggcagggtgagcagtcccagtggtcctagtgccgcatcagatccaggtgggtgagggcaggaggcccctgcggaggcagcgtggatctgcccacacataggctactggaatagtttaacccagcaactttcctttttataaaacaacaaatggttcaactctgtctgcaaattaacagctgaacacctgcaactgcaaatgttttttgatccgacgtactgaaataggaagtcatgctcttcccaccctccacccaccagagtggaacccgctgcaaaatccccagccttaattcttgcttcaggacccagaccggtgtcttgctctagggcaacccagggcagaggggccaggtctgcccagcgtttaccactgctgtcaagccacagcccttggccaccatacgggccatcctcagtgaggcagccccccataggcttccgccaagctctggtcccgaagaggctgtgcgagcccttcccggccctccccagggccccccgccccctcctctgcctgctgcgtggaggcagccatgggaaggagcccaggggagctggcctgggggagcgaagcccatgttcgcttcctgacttagagctggggggggtggggggtggggcttgttcccctgcagtatctgttctgtgaagtttgttaaatgtaaggaaagcttaaattcttgtatctttaaaagagaaaatcttatttaacccttttgtgttctagatttacttacacacatagcctagagctcagttttagttttaacattgtgaaaatattaaaagaatcttgtaactttattcttttttctcctgctgaaaaaaaaaattaaaccaatcgtatgaaaaaaaaaaaaaaaaaaaa

SEQ ID NO: 1051 - DNA, 105 bp, Homo sapiens
atggcgtttctccgaagcatgtggggcgtgctgactgccctgggaaggtctggagcagagctgtgcaccggctgtggaagtcgactgcgctcccccttcaggtag

SEQ ID NO: 1052 - DNA, 3300 bp, Homo sapiens
acgggagctctttcccttctctcctcctcctcgcccttctcctcgccctcctcctcctcctcgccctcctcttcctcctcctcctccttgccctcctcctctccctcctccttctcctcctccacctcctctccctcctcctcctcctcctgcgctcaccgccggcagccagcactttgcgctcacccagagagtagctccacttgggtgcgagaccgagaggggcatatccgttcacgccgatccatgaaaatgctttggaaattgacggataatatcaagtacgaggactgcgaggaccgtcacgacggcaccagcaacgggacggcacggttgccccagctgggcactgtaggtcaatctccctacacgagcgccccgccgctgtcccacacccccaatgccgacttccagcccccatacttccccccaccctaccagcctatctacccccagtcgcaagatccttactcccacgtcaacgacccctacagcctgaaccccctgcacgcccagccgcagccgcagcacccaggctggcccggccagaggcagagccaggagtctgggctcctgcacacgcaccgggggctgcctcaccagctgtcgggcctggatcctcgcagggactacaggcggcacgaggacctcctgcacggcccacacgcgctcagctcaggactcggagacctctcgatccactccttacctcacgccatcgaggaggtcccgcatgtagaagacccgggtattaacatcccagatcaaactgtaattaagaaaggccccgtgtccctgtccaagtccaacagcaatgccgtctccgccatccctattaacaaggacaacctcttcggcggcgtggtgaaccccaacgaagtcttctgttcagttccgggtcgcctctcgctcctcagctccacctcgaagtacaaggtcacggtggcggaagtgcagcggcggctctcaccacccgagtgtctcaacgcgtcgctgctgggcggagtgctccggagggcgaagtctaaaaatggaggaagatctttaagagaaaaactggacaaaataggattaaatctgcctgcagggagacgtaaagctgccaacgttaccctgctcacatcactagtagagggagaagctgtccacctagccagggactttgggtacgtgtgcgaaaccgaatttcctgccaaagcagtagctgaatttctcaaccgacaacattccgatcccaatgagcaagtgacaagaaaaaacatgctcctggctacaaaacagatatgcaaagagttcaccgacctgctggctcaggaccgatctcccctggggaactcacggcccaaccccatcctggagcccggcatccagagctgcttgacccacttcaacctcatctcccacggcttcggcagccccgcggtgtgtgccgcggtcacggccctgcagaactatctcaccgaggccctcaaggccatggacaaaatgtacctcagcaacaaccccaacagccacacggacaacaacgccaaaagcagtgacaaagaggagaagcacagaaagtgaggctctcctcccgccccgcccctcccacgcctcaccagccccccgcgcgcccaccctccggcgggtgacagctccgggatcagcaacccttcctgctgctgctactgctgctgctgctgccgccgccgccgccgccgctgcccttgggtccccccgagtctccgggactgccctctcgactgtcagtggggcagcctctccgactctgcacccgcctcgacctccccacccgctcccacacccctgtgccctcatgtggagcctaagagaacagaacaggccgtgaagccagcagagaaaagttctgccaagtttgtgaacccttttttttttaaacaaaacaacaaatcaacaacagcaacaacaacaacaaaaattaaaaacttttttctaaaaaaaaagtgaaaataaaaaaaattatatgcgcttcatgggactgagtcaccaccttcccttacatacttcagttcagattgtagccatacttaaaaaaaaaaaaaaagccaaaagatgatgacaacatttttatcagtattgtgaataaacttgaacacaaatacacgaagttccatgtcatgtcttcagttgtagaagtttttcctctttaaggtaaagcgaccaacttgaactttctctggcaacacgattcgcagttatataagggaatcagtgttcacgtctctgtatatatttatttatgtgtaatttaatgggaattgtaaatatggtgagtctgttttaagcctttttttttttatttatctgatcttgtttacctcttgtttagtgggttttgaatcttccctattagttcttcatgtggttcatggtactgatttagaaatccagtgtttgggggatttttttctctgggattcatgaatttagccctgttgtagcatgttaaaggtgacaaacagctggacaaatttttaaaaagtaaaataaaattttatctataattagtattattacatttagcttttcattgaaccgaaagaaaaaaagtgatattggaccctggaaagattttgaaacttgagtggtttgataacccttctatgtattgtagggagaaaaaaaaaagtttattttattccactgtcctcccttaaaagcatcatttgagcaataaatgaatattgtctttaaaccaagggttagggaattttcctctctctctctctctcctctctctttctgttcaaagaacttcaaacatttgggaccacctggtattctgtattttcactggccatattggaagcagttctagttgcattgtattgagttgtgctggcagtagtttccatgcctgtcaatgtatcatagtcctttgttgcccagataaataaatatttgatacgctttatgtcgatttttttttattcagtggctgtctttacccaggcgtatttttgttcttggcagtattttttattcagtatggttacagtaattgagtttaactctcccttggcaattgctccttgcaataagcagctgaacccattgtttccctcaagtataataaaaacttactttcaacttggagttcagagcagggtatcatttagatattccactgtgtctgtattcagacaaatgacacaataaaacccaatgtattcttttggataaaagattgtttgtactgctaaaggaatgacatactgtcttttccttactagaaacattaattttattattaaaaataaagttttattttattta

SEQ ID NO: 1053 - DNA, 5770 bp, Homo sapiens
ttctctttgctgaggcttacttgtccagcctattgtttgagacaacagatataagttgcgatgggagaggagcgtcggatttggtgtgtatcccccatttccaattatagatggatcattacagacagcggagtcctgagaagccagacatctgctcctcacatgaatgcactcacctcctagagaccaggctgccatcatgctctggaagcttgtggagaatgtcaagtacgaagatatctatgaggaccggcacgatggtgtcccgagccacagctcgcggctctcccagctgggctcggtgtcccaaggaccctactcgagcgccccgccgctgtcccacaccccgtcgtcggacttccagccgccctacttcccacccccctaccagccgctcccctaccaccagagccaggacccctactcccacgtcaacgacccctactccctgaacccactgcaccagccccagcaacatccctgggggcaacggcagcggcaagaagtgggttcggaagccggctctctcctgccccagcctcgggccgccttgccccagctctcgggccttgacccccggagggactaccactcggtccgccggccggacgtgctgctgcattcggcgcaccacggcctggacgcgggcatgggtgacagcctctcgctgcacggcctcggccatcccggaatggaagacgtccagtcagttgaagatgccaataacagcggcatgaatctattggaccagtctgtcattaaaaaagttccagttcctcccaaatcggtgacttctctaatgatgaataaagacggcttcctgggaggcatgtctgtcaacaccggcgaggtgttttgctccgtcccaggccgtttgtctctgctcagttcaacttcgaagtacaaagtaactgtgggagaagttcagagacggctgtcgccccctgaatgcctcaatgcatctctcctcggcggagtcctcagaagagccaaatcgaaaaatggggggagatctttgcgagaaaggctagaaaaaatcggtttgaatttacccgcgggcaggcgcaaagcagcaaatgtcacgttactcacctccctggtggaaggagaagctgttcacttagctagggattttgggtacatttgcgaaacggagtttcccgccaaagccgtctctgagtatttgaaccggcagcacacagacccgagtgacctgcactcccgaaagaatatgctgttggccaccaagcaactttgtaaagaatttacggatctactggcgcaggaccggacaccgatagggaacagccgacccagccccatcctggagccggggatccagagctgcctcacgcacttcagcctcatcacgcacggcttcggcgccccggccatttgcgccgcgctcacggccctgcagaactatctcaccgaggcgctcaaaggcatggacaagatgttcttgaacaacaccaccactaacaggcacacgtctggggaaggcccaggtagtaaaactggcgacaaggaggagaaacacaggaaatgaaaaatttttaaaaaaagaaggaaaaatgttttaaatacaaaaggaaaaacagacaaaaatttaattttagctttaaaatattggattggctttggaagaattatattaggtagaatacacatacaatcaaaattttaaaaaaaaaagctaaataacttaaaaaaaaactgaggcgtacaacggagcaacaatatcggttctcagtgtctatttcaagatacatttggagacaaccgtccggattttccacttcggttctttcgagtttagtaatactgataataaaagaaaaccatgatttccccttccctttggaaaataaacataagactaaacatgagaaaaacgctaacttattggaagaaaatcggagaaacgttggtgtcaatgctttgagagctggttgactgagacgcacgaactttttaattttaaatatatttttaggaaactctcgcagtccccgccctccatctcacctcacccgtctcccaaccacccttttccatgttaccctcccttcctcacattgttacgggaatcttctgggatgaaaatgagtgtggttggcccttttgcgttgtttcagtcctctcggtacctccccgcccagccctgcgatcttaactcaccgggcccggctccccggccgcttgcataattagggagggcgagggcggggcgggaggcctgtggagaccaggcggaggctgcaatttttggtgccggccggcagagcaggttctggcggctgaggaaaatccggaccaataagttgattcaaacatcatcagttcctttcagaaatgttactagctcccagccttgccagcatctgcatagagagaatctcacatttattatatttgtgtcatctactaattttatgaactatagtaaaaaaaaaaaaacacacacacacacaatatgaatacgttgattagtatgtaattccttcggaggggtatgtaccatttcattctcttctgttttccaaagctttgcccgcatggtttatgagcttcttcaaagaggacttgggcttcctacacaatctataaggtacagagaaaaaaaaatccgatccctttttaatcaaagcctgtgtgtcagaattctgcaggtgcacttctttaaagaagctcaaagggaataatttagaaagtggccaatatgatggaagcagctttgaatctacatgctaacattcctcaacactccaattccggtggaggtggcaggggagggggtctgcaaaatgaattttaagggaaaagagtaaggattcttagagccctatattctaatagtattgccctgcatttaaaattgatttgatttccctgggttctttggtgattgctgtttaagcaaggaaagaagcagctttacgagtggacgtggggaggagggcggcacaagcacccacatttctgtaacaattgctttcttacaagatgctttatgaatgaggcatttttccctcccagacgtgcacttgttttggcatataatggcaaaataatgcaaagtgaagggagatgtatttcagctttgatttttaccgtctggatacatcgggactattcccagtggataaagtttcatgcatttaatatttctcacttctggcagcccagctcctttcttgggctccatcttagcattatcatgaaataagatctggaatccattgtctgcacctccgcaaaagcagtgagaaattatcccgggataagggtgaatgagagaggtctctaaatatagtgttgatacactcacctatttaacaaagtagacgagatctttgcaataccccttaaagataacgacatagatgttgttctgcaggatttatagttaggacccactcaattctccaggactcccggttttgcccccctcccgctttgccttggtgggggtggggattgggggagtggggattgcgttggggttttaggaatctgctgagagctttgcccatttttattaaaagaggaaagggaagttaggaagctcgtctcaggtcaccaaaagggcccaagcaactgttagggccacactgcagcccatctccaacccctagcttcgtttagcacttctgatcttcatggcccagccctagaactgttgagaggaatgcaatggccaagagctagacgttacggagagtgtagtcactctcttttcccagctcagaggcctgcgccttcgtccgagagctcggccgatcgcattagatgtgttctgattgcacaaggccaggagagaccacactgaaaacgatcgtctcctttccttgcagggcaacgcgccccacgcgtgtgacgtgcgagagacgcgatggacgcgccttgctcttactgtgcaggtcctgagagcgtgtgggccacaggcgcccagtcgtgttgaggacatagaatcagccgctggaggggctgccgactgcgcgggcccttcccgctctcggtctcaccctaagggctaaggcgaccgagaaagccccattctccagtaggtaatggggcggcgcccggtgggctgcaggtggggagggctcccagcgccgccagcggccacccggggcgccggctcctggagggagagtggcctagaaatatccaaggaatccgaagcttcccctcctccacctctgccagtacggaaacaccccaccgtcacaatcctaaagcggggagatgggatgggaattgtcttacttggcaaggcagggtaccttcattgccagacgccctcatttgtgtgttcctccttgctccagcgagatagaaccttttgcgcccccaaccccgtttcgtggagtgagcccactaccccttctccctccctcacttctcctttcatgtaggacccccgcccccttgctttccttagccaggcccgctacatttatctgataattgagttattaaaagatttggtttccttgggcctataaatcaataaacagtaggattaacgcaatagtttgccttttaagtcaagggagacgtttaaggcaagcccctttgagctttgttttcaaaccaaacaggtgagttgcagctctccccccggcccctgcactcttcagacatttggtccctgcccactcctaaacgctcagtcccaaaacaaaatagcgaaagacaggaggagtcaggatgtggcagtgctgccttcacactttccacttcgcaagttcttttaaaggttccaaagatctccagaccattctctgccaaaccctgccgcctcctgcacgtattgcaggtctctggggagcaagaaatgtcctgtttgggtgaggattccgtcacctaaaaagatctttaacttctcccccaaagtgggaaggtaactttctcccccttttccccaccaccttcactcctacacccccaattaccttgcattttctttccttccttctggcctccacacccatagctttcctccatccccacttaaagaaccgaagaggcttttaaagacctggctgctttgttttccttggccaaggaagccactttctctcaagcaattatttcatatcctacgaaaactttggtcgaatggaaaactcgaaacctcgagcttatctacacactgttcctctgctacaatgctttcctagttaagagtgtttatagagaatttgtcatcacatctgatatcctgtacttgtaatacattatgtggaaaggaaataaccttaaaccgtctgatgttgcctcaagagcccaaacggcgtttccccacctttgacgatgtatgtgaaattactggcttaaaaaaaaaagtatcaatttttttttaacggaatgaacactatccttctttaaatgccaaaatcgactccacctttgagttggtctctaattctctaacattgtttttgccacacaatcaagaaatatcaatctattgactcttcacgagaagagctctggagggtattcatgttaagtttgtatatatttatttatgcttaatttaatgggaatgtgtaaatatggcgagcaagtagtttgggattatttatctgtgaatctatacctctgtgaatgggtggttaaaaaacctcttgaccctagatagaatcctatctgaatttttctgttctttataaacaagctgttatggtaatgggtagaaattggtttattgtccagtgttaatctgatttacataaataaaaagattgttgtgttttca

SEQ ID NO: 1054 - DNA, 2040 bp, Homo sapiens
acaataaaatgtgtgcaaatactctccacagagataagtccccacctcagtcggtatagaaaagcatgataaaggttggaaaaaatggataaaaatgttgaaagaacctccagttccttattaggcgaagatacaatatttattccttgtctcctgggataaatctcttctgcctattgtcctcccagttctcagtgctgatgcttaattttcaaaacttctatattaccaagggacctacgacatcagccaaagaaatactcagcaagtacaaaatctgttccagggagctgcttttgtgcagagggaaaattttgttcctacaggtttttaagtgggtacgaggcaaggagctatctgatccgggcaaaaccattacaatttagatatctacctatagaacattttttttttcctttaaaaattggaaaatacaagaagtttggatttttttttcccgattctttttttggagggggaaattgcatcgtaagctttcggagaaacccaacatgtcaactacctttccgggactagtccacgatgccgagatacgtcacgacggatcaaacagctaccgtttgatgcagcttggctgtctggagtcagtagccaattccactgtcgcctattcctcctcctctcctttaacttactccaccaccggcaccgagtttgcgtccccctacttctccactaaccaccagtacaccccgctccaccaccagtccttccattacgagtttcagcacagccacccggccgtcacccccgacgcctactctctgaactctctccaccactcgcaacagtactaccagcagatccaccacggggagcccaccgactttattaacctgcacaatgcgcgggcgctcaagtcgtcctgcctggacgagcagaggcgggagctgggctgcctcgatgcctaccgccgccatgacctgtccctcatgagccatggctctcagtatggaatgcacccagatcaaagactcctgccagggcccagcctggggctggccgccgcgggagcagacgacttgcagggctctgtggaggcccagtgtgggcttgttctcaatggccaaggtggagtgataagaagaggtggcacctgtgtggtcaaccccacagacttattttgctctgtccctggccgtttgtcccttcttagttctacttccaaatacaaggtgaccattgctgaggtaaagaggcgcctctccccacctgagtgcctcaatgcttcactcttgggaggcattttgagaagagcaaaatcaaagaatgggggccgctgcctgagagagaaattggataggcttggcttaaacttaccagcaggaagacggaaagcagctaatgtcaccctccttacttccttggttgaaggggaggctttgcacttggctcgggattttggctacacttgtgaaacagagtttccagccaaagcagtaggagaacatcttgccagacaacatatggaacagaaagaacagacagcaagaaaaaagatgatcctggcgaccaaacaaatctgtaaagaattccaagacctcttgagccaagatagatcaccactgggatcctccagacccactccaattctagaccttgacatccagagacatttaacacatttcagtttgatcactcatggctttgggactccggcaatatgtgcagctctaagcactttccaaacagttctcagtgaaatgctgaactacttggaaaaacacactactcacaagaacggcggagcggcggattctggccaaggacatgccaactcggagaaagctcccctgcggaaaacttcagaggctgccgtgaaagagggcaaaacagaaaagacagactagctacatcaaacagaatctatttccagagagtcttgctgctgatattttttctaatatatatatcattgagggtgactaatcttcagtggaccaaatctctacccttccccaaccctccataaaaaaacaaaaatggaaatgaaaaatgaaacaaaaaaggacaaaacca

SEQ ID NO: 1055 - DNA, 2895 bp, Homo sapiens
cgccaggacacactgttcgggcgcggctttccccgtccgcggagcggtcttgacactcgcggcggcagcatctacgctcgcagagccgccgatgcgtgtccagtgacccggacagcaaggcccgcgcgcggcgggggcggcggcagacgcctggtcaccgtgaccccgattttggatttaccgcttgggggctggggggatcctggatttaactggcgactgttttgggggacgccggacgccatgttgtggaaaataaccgataatgtcaagtacgaagaggactgcgaggatcgccacgacgggagcagcaatgggaatccgcgggtcccccacctctcctccgccgggcagcacctctacagccccgcgccacccctctcccacactggagtcgccgaatatcagccgccaccctactttccccctccctaccagcagctggcctactcccagtcggccgacccctactcgcatctgggggaagcgtacgccgccgccatcaaccccctgcaccagccggcgcccacaggcagccagcagcaggcctggcccggccgccagagccaggagggagcggggctgccctcgcaccacgggcgcccggccggcctactgccccacctctccgggctggaggcgggcgcggtgagcgcccgcagggatgcctaccgccgctccgacctgctgctgccccacgcacacgccctggatgccgcgggcctggccgagaacctggggctccacgacatgcctcaccagatggacgaggtgcagaatgtcgacgaccagcacctgttgctgcacgatcagacagtcattcgcaaaggtcccatttccatgaccaagaaccctctgaacctcccctgtcagaaggagctggtgggggccgtaatgaaccccactgaggtcttctgctcagtccctggaagattgtcgctcctcagctctacgtctaaatacaaagtgacagtggctgaagtacagaggcgactgtccccacctgaatgcttaaatgcctcgttactgggaggtgttctcagaagagccaaatcgaaaaatggaggccggtccttgcgggagaagttggacaagattgggttgaatcttccggccgggaggcggaaagccgctcatgtgactctcctgacatccttagtagaaggtgaagctgttcatttggctagggactttgcctatgtctgtgaagccgaatttcctagtaaaccagtggcagaatatttaaccagacctcatcttggaggacgaaatgagatggcagctaggaagaacatgctattggcggcccagcaactgtgtaaagaattcacagaacttctcagccaagaccggacaccccatgggaccagcaggctcgccccagtcttggagacgaacatacagaactgcttgtctcatttcagcctgattacccacgggtttggcagccaggccatctgtgccgcggtgtctgccctgcagaactacatcaaagaagccctgattgtcatagacaaatcctacatgaaccctggagaccagagtccagctgattctaacaaaaccctggagaaaatggagaaacacaggaaataaaattggaacgaagaaaggttaggagagtagggaaggaacaggactgcaaaaatccttctccaccgcacagactgggaacccctcctggcctgggggaagagtttgttacctaccttactatttaaagagccttcactggttctgcatcacccgcccctggacttcttagttgtttctctagcgctgagctatctcctaactttggacctattatcagaaggtgacaagtactggctctttattcattaagctttttttttttgaaccccattctttccttctctgaaagtggtgctataagttttagaatcttttaaatacattccctgggccaacagacccacacacttagccattgaaatgtcaaattgatgtgccctagatcaacagatcaacaataccttttttttcagtgttaaggtaatggttggtttttgtgtccgctaaatatttaccttgaaaaaaagaaaagtgtgtatctagcttcttcagagatcaagtcctctggtaggaggcaaaggttctatctgcttagcaactagttaataagtggtatctgacacactctaaaccccgtgttcaaacgggggccttctggttttaggaaacttgtagaaacgaagcctgctgattgatttttttctcctttttttttttttttttttttaactttgaaagttaactcttcaaatgggagactctttgaaatgacatgttcctttaaggtactgaagctttatttgcatatttatttcagatgtttcgagtaaacttgaaaagggtaggcacgaagcaatttgttgctgcttgtcacccccaagtccccgtggaggttctgtattttaagaaacagtgcgttgagtgtacagattttatttatgcgtaatttaatggggtctgtaaatactggtgcacttcttacgacttttttgagacatgggatccaattttaatattaacttttaatggtgatggggtaatctataacacatcataaggttttattcatatatatacagggtattaagaattaagaggatgctgggctctgttcttggcttggaagattctatttaattgaaactctctgttcagaaagcaataactttgtctcgttcctgttgggctgaaccctaaggtgagtgtgcagtacagtgtgtgtgggtgaaatggagatttggaattgaactctctgcctgtaaatgttccccaaataattgttgtgtgtatgatacgtgtataataaaagtattcttgttagaatctgaaaaaaaaaaaaaaaaaaaaaaaaaaaaaaaa

SEQ ID NO: 1056 - DNA, 2147 bp, Homo sapiens
cacacacacacacacacacacacacacacacacacacacacacacatacacacgcccggggaggcaggccggagagacctccctcccgcccctcccgcccgcctccctcccctcgccgccgccgccgccgccagcatctgggaccggccgattctgcacctccgtccggcgctgccctttgattcggatttccatcttgcattctccggctgatcgcgggacctggctcgtgcagaggaggggggccgatcgctatggagtatttcatggtgcccactcagaaggtgccctctttgcaacatttcaggaaaacagagaaagaagtgataggagggctctgtagccttgccaacattccactaacccccgagactcagcgggaccaggagcggcggattcggcgggagatcgccaacagcaacgagcggagacgcatgcagagcatcaacgcgggattccagtccctcaagaccctcatcccccacacagacggagagaagctcagcaaggcagccattctccagcagacagccgagtacatcttctccctggagcaggagaagaccaggctcttgcagcagaacacacagctcaagcgcttcatccaggagctgagcggctcgtcccccaagcgacggcgggcagaggacaaggacgaaggcataggctccccggacatctgggaggacgagaaggcggaggacctgcggcgggagatgattgagctgcggcagcagctggacaaggagcgctcggtgcgcatgatgctggaggagcaggtgcgctcgctggaggcccacatgtacccggaaaagctcaaggtgattgcgcagcaggtgcagctgcagcagcagcaggaacaggtgaggctgctgcaccaggagaagctggagcgggaacagcagcagctgcggacccagcttctgccccctccggcccccacccaccaccccacggtgatcgtgccagcaccgcctcctcctccctcccaccacatcaatgtcgtcaccatgggcccctcctcggtcatcaactctgtttccacatcccggcaaaatctggacaccatcgtgcaggcaatccagcacatcgagggcacccaggaaaagcaggagctggaggaggagcagcggcgagctgtcatcgtgaagcctgtccgcagctgcccggaggcccccacctctgacaccgcctccgactccgaggcctcagacagtgacgccatggaccagagccgggaggagccgtcgggggacggggagcttccctgactacccccccagccctcctctcccttctgggggctggagggagccggggcagccacagggagagacatgggcgaatgagtgagaaatttttacaaaattacgatgtcatttgggtctcttttatgacctctttttcaatactgtaaatcgacctttgaacgaagccactcaacccgaggtcccggggctggggtgtcgcagagcgtgtgggagcatcggcaccccagggcggggcctcggccccgggggctggaggaagctgacacggagatgcctggcctctctctgccaaaaagcattttttcctttaaatatgttttttaagaacagggaaaattaaacaaaaccccaggttatttcttccctgcccagagccagcctgggattgtcagccttcaatcccctttccttcctctttttgggttttcttctttctcctttaagcacttacatggttgggggtaagactaggctggggcattctgggggcccggaggtctccgttgcttcttggttggggtttgctgctgctgtgcccccctcccccttccccatctcggcactagaattcgccactctcccaccccccagcccccacctctgcctccaggtctcatcttccaccccaaaaatgtctgtctctctctttttgttttgtttgttgttggttttttatttctttttggtttgctttctgtttttgttttgtttttcttttttttctttcttttttttttttttttacaattttgaggtcttcgtgttcaaggagaagctattatattttgttaagaaagtggggagaaaaaaaccaagaggccaccgtgcctttgtaaagaaacaaaataaagtttgtactttgttttttaaaaaaaa

SEQ ID NO: 1057 - DNA, 1289 bp, Homo sapiens
tttctttcggagcggcggtgaaggtcctgggtgaggtagggttggatggtgcttgccgcgtatcatggctgcctccggaaaactcagcacttgccgtctccctccgttgcccacgattcgagaaatcattaagttgttaagactgcaagcagcgaagcagctatcacagaatttcctcctggacttgaggctgacagataagattgtaaggaaagctggcaatctgacaaatgcttatgtttacgaagtgggccctgggccagggggaatcacaagatctattcttaatgccgacgtcgctgaacttctggtggttgaaaaggacactcgatttattcctggattacagatgctttctgatgcagcacctgggaaactgagaattgttcatggagatgtcttgacatttaaggtagaaaaggctttttcagaaagtcttaaaagaccctgggaagatgatcctccaaatgtacatattattggaaatctgccttttagtgtttcaactccactgattatcaagtggcttgaaaatatttcctgtagagatggaccttttgtttatggcagaactcagatgactttgacttttcaaaaggaagtggcagagagacttgcagccaatacaggaagcaaacagcgtagtcgcctctctgttatggctcagtacctctgcaatgttcgacacatctttacgattccaggacaagcttttgtccccaaaccagaggtggacgtgggcgtggtgcacttcactcccttgatacagcccaagatagagcagccattcaagctggtggaaaaagtggttcagaatgtatttcagttccgaaggaaatactgccatcgagggctcagaatgttattccctgaagcgcagcgcttggaaagcacgggcaggctgttagagttggcagacatagaccctactcttcggccccgccagctctccatctcacactttaagagcctctgtgatgtatacagaaaaatgtgtgatgaagacccacaactctttgcatataatttcagagaagaactcaagcgaagaaaaagcaaaaatgaagaaaaagaagaggatgacgcagagaattacagactctagctgctgcctgggggcgagcagcctaccagatgtcgatttgcactacgtggagcttcttatataggtactcttttgtctttacagaatgacgatacaaatgccaatgaccagatgtgacttattttccttttactatacagcttggcagagaaaataaatatcatcaaataagatacagtaaaaa

SEQ ID NO: 1058 - DNA, 1799 bp, Homo sapiens
ctagtgtttacttccgcttgacctggcccggacgccagaaaatgttccacgtgggataccctgcgtggggttcactgtagtagctgcactaggtgattcttggagcgggcctgagagacaaggacatgtggatcccagtggtcgggcttcctcggcggctgaggctctccgccttggcgggcgctggtcgcttttgcattttagggtctgaagcggcgacgcgaaagcatttgccggcgaggaaccactgtgggctctctgactcctctccgcagctgtggcccgaaccggatttcaggaatccgccaaggaaggcgtctaaggccagcttagactttaagcgttacgtaaccgatcggagattggctgagaccctggcgcaaatctatttgggaaaaccaagtagacctccacacctactgctggagtgcaatccaggtcctggaatcctgactcaggcattacttgaagctggtgccaaagtggttgcgctcgaaagtgacaaaacttttattccacatttggagtccttaggaaaaaatctggatggaaaactacgagtgattcactgtgacttctttaaactagatcctagaagtggtggagtaataaaaccacctgctatgtcttctcgagggctctttaagaatttgggaatagaagcagttccttggacagcagacatccctttaaaagtagttggaatgttcccaagtagaggtgagaaaagggcactttggaaactcgcatatgacttgtattcctgtacttctatatataaatttggacgaatagaagtaaatatgtttattggtgaaaaagaattccagaaactaatggcagatcccggaaatccagacttgtatcatgtattaagtgttatctggcaattagcttgtgagattaaggttctgcacatggagccttggtcatcatttgatatatacacccggaaagggccgctggaaaacccaaagcgtagggaattattagaccaattacaacaaaagctgtatcttattcaaatgattcctcgtcaaaatttatttaccaagaacttaacacctatgaactataatatattttttcacttgttaaagcactgttttgggaggcgcagcgccactgtaatagaccacttacgttcattgactccacttgatgcgagagatatattgatgcaaataggaaaacaggaggatgagaaagtagttaacatgcaccctcaagacttcaaaacactttttgaaactatagagcgttccaaagattgtgcttataaatggctgtatgatgaaaccctggaagataggtagcaactagactgtcgtttttggtggagcggttcatttatttggaaactatgacatgaaaaccaaatttgaaaactcacatcctttcagcagaaggtaactgttcttgtcttgcacaagccaggcagatcatttctcctaagctgatatcattggcttattggatgaaacagtgtctgctattttattcacaattgaataaaatgaaaacttcaattaattgtggatttgatcagattgaattcgttttgtttcagattcctatttaaatatttcacttgtactgttgctgatttttgcatcttcttgaagagcaagagtctgtacattattaagcttagaaagtaagcaaaactgatttactggtttgcctttcagtttgttgaaatgtattgtcaagtactgtacaatgaaattgtttaaattttaatatgatttaagctttttagaaattaaaatattttaaataagaaaaaaaaaaaaaaa

SEQ ID NO: 1059 - DNA, 3715 bp, Homo sapiens
gacgtcatgttcgccgggcaggcgaggaaagaggacgccatgattggttggcgctggggcggcggacggtggaagggcctggcgagtctaggttttacgcctgtgctggactttctccttccatgtttccaggccgtggggggctacagagggcgagaagtcggctcagcggaaacctggatttggttctaagccgtggggttgagaaggggtgaccggaagtgatcgtgggactgaccggaagcgaggcctggaggggaaagagagagcgagacctgggagggagggggcctccagcagaaaggggcgggggaaaaggtgcaaaagcagcgtgggagcgccgggctggcttcctgcggctgctgctggtctgactgggaagcagcaagccaccactacgaactctcaagaggagtgggagtgcgggagtccagagctgcctctgggaagtctgcagtagttgagcaaaggggtcctcacgttcctgagagctgggcaggggggattttggaacctggggcagccaagaacgagcagccaagggtacgggagattagttgtgcacagagcagtgctggtcgggcttgggggtggctggtgggcactgcgtgggaaaccttggtttgtagttttcttggtttgcgttactcctgttgggtagaattaccctccgcgcctttgtacaagacacggtgtctcctggggcaaggaaggagccaggatggcctgggctctgaagctgcctctggccgacgaagtgattgaatccgggttggtgcaggactttgatgctagcctgtccgggatcggccaggaactgggtgctggtgcctatagcatgagtgatgtccttgcattgcccatttttaagcaagaagagtcgagtttgcctcctgataatgagaataaaatcctgccttttcaatatgtgctttgtgctgctacctctccagcagtgaaactccatgatgaaaccctaacgtatctcaatcaaggacagtcttatgaaattcgaatgctagacaataggaaacttggagaacttccagaaattaatggcaaattggtgaagagtatattccgtgtggtgttccatgacagaaggcttcagtacactgagcatcagcagctagagggctggaggtggaaccgacctggagacagaattcttgacatagatatcccgatgtctgtgggtataatcgatcctagggctaatccaactcaactaaatacagtggagttcctgtgggaccctgcaaagaggacatctgtgtttattcaggtgcactgtattagcacagagttcactatgaggaaacatggtggagaaaagggggtgccattccgagtacaaatagataccttcaaggagaatgaaaacggggaatatactgagcacttacactcggccagctgccagatcaaagttttcaagcccaaaggtgcagacagaaagcaaaaaacggatagggaaaaaatggagaaacgaacacctcatgaaaaggagaaatatcagccttcctatgagacaaccatactcacagagtgttctccatggcccgagatcacgtatgtcaataactccccatcacctggcttcaacagttcccatagcagtttttctcttggggaaggaaatggttcaccaaaccaccagccagagccaccccctccagtcacagataacctcttaccaacaaccacacctcaggaagctcagcagtggttgcatcgaaatcgtttttctacattcacaaggcttttcacaaacttctcaggggcagatttattgaaattaactagagatgatgtgatccaaatctgtggccctgcagatggaatcagactttttaatgcattaaaaggccggatggtgcgtccaaggttaaccatttatgtttgtcaggaatcactgcagttgagggagcagcaacaacagcagcagcaacagcagcagaagcatgaggatggagactcaaatggtactttcttcgtttaccatgctatctatctagaagaactaacagctgttgaattgacagaaaaaattgctcagcttttcagcatttccccttgccagatcagccagatttacaagcaggggccaacaggaattcatgtgctcatcagtgatgagatgatacagaactttcaggaagaagcatgttttattctggacacaatgaaagcagaaaccaatgatagctatcatatcatactgaagtaggagtgcggcgtttcgtgcccagtggctgctccttccttcacctctgaaaacggccctcttgaagggggatatgaatggagatttgaaggtctgcaagaacctgactcgtctgactgtgtgtggaggagtccaggccatggaggcagaatcctggccctctgtgttggcccaagctcttgtggtacacacagattactgcccaatatgcagttctgcagctgttttagttaaatttctggaccttgttgttgttaaatatcagtagaaactctacataatttagagtgtatgtagggcataatgatgatgggaattgtgtgatgtttaacaggaagatcttaaattttgtgatatggagccctgtaatttttttcttatataaaaatgggtatctatattcataagactaggtcttcaatctctttgtactggtctcaaatgtactggtatctctgctttttgccacagtttgtccctgaaaactttatcagtgaggagaaatacagaattttccttttggttcccctgtaataccacaactaatagtattttcagctaacatttattgaccaggcagtgtgataaattttttgaatgaccatcttgtttaaccccctaatcacactatctgaagtaggtgctatagtgacccccaaccgaagatgaggaaatggagacacacagtggctaagtagcttgctaggtgccaggagctggcaggcagtgatgctgaaatccaaaccaggcaatctggccctccttattcaccctctcataccaccagtgctacccattataacctgtgttcacttcgcttattactgtggcccttctggtgactacaacataacactgagtatgaactgaggaattaaccactgaaagagacaaagcacacctaaataatgatgaacaaatcaagacctacaagaaatgaacacatagatgctttttaagtgtcattagttatcggaatcaaagaatttgaggtggtgacaactggggattatctgtaactccccaaatttactgttcttgaatgacattctcaaactatttattaatgagttagtctcatccctgctttctgtttcctctctctgcatcttctcttggcataggaagttattttactcatgctatgttttttaatagaagctttacaaaaaaagatgcattcccttcctgttcacactcttaccatgtttttgttcttccttaagaatgattgtgtgtgtgtgtgtgtgtgtgtgtaagtgtgtaagtgtaacatcatgggttttctttcttcacttgtaaagttttatctagaaatacttttacaggttatgttgaggtacacaaagataatgttctaagattgtgtattggatttggatttgtgtgtgtgtgtgtgtgtgtgtgtgtttaaagcatttgataaggtttaaatgttttttatacagagatttttgttcattaaactcaatctgcatcatggtctaa

SEQ ID NO: 1060 - DNA, 3431 bp, Homo sapiens
gggggaggagggcggtcgtccggggttaggttgagggggggcgtcggtccgttctgggcgggggatgactcacagcccatcccatctcccagacgccgcccgcccgcgcagtgctagctccatggcttagcggaggaggcggcagtggcgagctggggggaggggggactcttattttgttagggggaccgggccgaggcccgaccggcctggcagggctcgcccggggccgggcgtcatgtctcatgcggccgaaccagctcgggatggcgtagaggccagcgcggagggccctcgagccgtgttcgtgctgttggaggagcgcaggccggccgactcggctcagctgctcagcctgaactctttgcttccggaatccgggattgttgctgacatagaattagaaaacgtccttgatcctgacagcttctacgagctcaaaagccaacccttaccccttcgctcaagcctcccaatatcactgcaggccacaccagccaccccagctacactctctgcatcgtcttctgcagggggctccaggacccctgccatgtcgtcatcttcttcatcgagggtcttgctgcggcagcagctaatgcgggcccaggcgcaggagcaggagaggcgtgagcgtcgggaacaggccgccgcggctcccttccccagtcctgcacctgcctctcctgccatctctgtggttggcgtctctgctgggggccacacattgagccgtccaccccctgctcaggtgcccagggaggtgctcaaggtgcagacccatctggagaacccaacgcgctaccacctgcagcaggcgcgccggcagcaggtgaaacagtacctgtccaccacactcgggcccaagctggcttcccaggccctcaccccaccgccggggcccgcaagtgcccagccactgcctgcccctgaggctgcccacactaccggccccacaggcagtgcgcccaacagccccatggcgctgctcaccatcgggtccagctcagagaaggagattgatgatgtcattgatgagatcatcagcctggagtccagttacaatgatgaaatgctcagctatctgcccggaggcaccacaggactgcagctccccagcacgctgcctgtgtcagggaatctgcttgatgtgtacagtagtcaaggcgtggccacaccagccatcactgtcagcaactcctgcccagctgagctgcccaacatcaaacgggagatctctgagaccgaggcaaaggcccttttgaaggaacggcagaagaaagacaatcacaacctaattgagcgtcgcaggcgattcaacattaacgacaggatcaaggaactgggcactctcatccctaagtccagtgacccggagatgcgctggaacaagggcaccatcctgaaggcctctgtggattatatccgcaagctgcagaaggagcagcagcgctccaaagacctggagagccggcagcgatccctggagcaggccaaccgcagcctgcagctccgaattcaggaactagaactgcaggcccagatccatggcctgccagtacctcccactccagggctgctttccttggccacgacttcggcttctgacagcctcaagccagagcagctggacattgaggaggagggcaggccaggcgcagcaacgttccatgtaggggggggacctgcccagaatgctccccatcagcagccccctgcaccgccctcagatgcccttctggacctgcactttcccagcgaccacctgggggacctgggagaccccttccacctggggctggaggacattctgatggaggaggaggagggggtggtgggaggactgtcggggggtgccctgtccccactgcgggctgcctccgatcccctgctctcttcagtgtcccctgctgtctccaaggccagcagccgccgcagcagcttcagcatggaagaggagtcctgatcaggcctcacccctcccctgggactttcccacccaggaaaggaggaccagtcaggatgaggccccgccttttcccccaccctcccatgagactgccctgcccaggtatcctgggggaagaggagatgtgatcaggccccacccctgtaatcaggcaaggaggaggagtcagatgaggccctgcaccttccccaaaggaaccgcccagtgcaggtatttcagaaggagaaggctggagaaggacatgagatcagggcctgccccctggggatcacagcctcacccctgcccctgtgggactcatccttgcccaggtgagggaaggagacaggatgaggtctcgaccctgtcccctagggactgtcctagccaggtctcctgggaaagggagatgtcaggatgttgctccatcctttgtcttggaaccaccagtctagtccgtcctggcacagaagaggagtcaagtaatggaggtcccagccctgggggtttaagctctgccccttccccatgaaccctgccctgctctgcccaggcaaggaacagaagtgaggatgagacccagccccttcccctgggaactctcctggccttctaggaatggaggagccaggccccaccccttccctataggaacagcccagcacaggtatttcaggtgtgaaagaatcagtaggaccaggccaccgctagtgcttgtggagatcacagccccacccttgtccctcagcaacatcccatctaagcattccacactgcagggaggagtggtacttaagctcccctgccttaacctgggaccaacctgacctaacctaggagggctctgagccaaccttgctcttggggaaggggacagattatgaaatttcatggatgaattttccagacctatatctggagtgagaggcccccacccttgggcagagtcctgccttcttccttgaggggcagtttgggaaggtgatgggtattagtgggggactgagttcaggttaccagaaccagtacctcagtattctttttcaacatgtagggcaagaggatgaaggaaggggctatcctgggacctccccagcccaggaaaaactggaagccttcccccagcaaggcagaagcttggaggagggttgtaaaagcatattgtaccccctcatttgtttatctgatttttttattgctccgcatactgagaatctaggccaccccaacctctgttccccacccagttcttcatttggaggaatcaccccatttcagagttatcaagagacactcccccctccattcccacccctcatacctacacccaaggttgtcagctttggattgctggggccaggccccatggagggtatactgaggggtctataggtttgtgattaaaataataaaagctaggcgtgtttgatgcgcttttaactttgaaaaaaaaaaaaaaaaaaaaaaaaaaaaaaaaaaaaaa

SEQ ID NO: 1061 - DNA, 1648 bp, Homo sapiens
cacttccagtcgccaccacctgtgcctggggaggtgttgaagttggatgatgtcattgacaacattatgcgtctggacgatgtccttggctacatcaatcctgaaatgcagatgcccaacacgctacccctgtccagcagccacctgaatgtgtacagcagcgacccccaggtcacagcctccctggtgggcgtcaccagcagctcctgccctgcggacctgacccagaagcgagagctcacagatgctgagagcagggccctggccaaggagcggcagaagaaagacaatcacaacttaattgaaaggagacgaaggttcaacatcaatgaccgcatcaaggagttgggaatgctgatccccaaggccaatgacctggacgtgcgctggaacaagggcaccatcctcaaggcctctgtggattacatccggaggatgcagaaggacctgcaaaagtccagggagctggagaaccactctcgccgcctggagatgaccaacaagcagctctggctccgtatccaggagctggagatgcaggctcgagtgcacggcctccctaccacctccccgtccggcatgaacatggctgagctggcccagcaggtggtgaagcaggagctgcctagcgaagagggcccaggggaggccctgatgctgggggctgaggtccctgaccctgagccactgccagctctgcccccgcaagccccgctgcccctgcccacccagccaccgtccccattccatcacctggacttcagccacagcctgagctttgggggcagggaggacgagggtcccccgggctaccccgaacccctggcaccggggcatggctccccattccccagcctgtccaagaaggatctggacctcatgctcctggacgactcactgctaccgctggcctctgatccacttctgtccaccatgtcccccgaggcctccaaggccagcagccgccggagcagcttcagcatggaggagggcgatgtgctgtgaccctggctgcccctgtgccagggaacaggggccggcctgggggctgggagggccaggggcacctccctcccacccttcaggctgcactgtgtgtgaagtagccacctgccctgcctccctcctccccgttggcccctgtttggacttagtgcctgtctggcagcctgtggggtcaggagaagcacccccagggcagccctcttgactggcgcagtgggaagaggccttcagcccctctcccggagatggaatcgcggggcagggaggggcagggtgttctagaggtgagaagagggcctggtggagattccctgtcttctgagcccgagcccctcattaccagtgaaggacatgcttgaggggttcgggaagctcctcatctgaggcaactggtcctgggggtgctcaggcctgcctttttgggactcagatggcaggaggtccaccccgcagcctggtcctcggctctcccacaggtgggcaccccccactttggtgctaatagctctccaccaggtggtgtgagcgcgggggctgccagaagcgggaggggtcactgccggaagagcagctgccctccgacccctcactttgtgcctttagtaaacactgtgctttgtaaaaaaaaaaaaaaaaaaaaaaa

SEQ ID NO: 1062 - DNA, 6631 bp, Homo sapiens
atcgtttactttggttgtcccttctggcatggtgcatatgttatgggaagagggattataatttggtgctgtttgtagagatgacaacactgataaaatccactcattgctggtcccagcacacctggaaagttctgcaaggcctcagctacagaaagcccagagacagaaagtaaactctttcatgacccttgatcatcagatcatcaatccaactcttaaatggtcacaacctgcagtgccaagtggtgggcctcttgtgcagcatgcacacacaactctggacagtgatgctggcctcacagaaaacccactcaccaagttactagctattgggaaagaagatgacaatgcacaatggcatatggaggacgttattgaggatataatcggtatggaatcaagttttaaagaggaaggagcagactctcctctgctaatgcaaagaacattatctggaagtattttggatgtgtatagcggtgaacaaggaatttcaccaattaacatggggcttacaagtgcttcttgtccaagtagtctaccaatgaaaagagaaattacagaaactgacactagagctttagcaaaagagagacaaaaaaaggacaaccacaacctcattgaaagaagaagaaggtataatattaattaccgaatcaaggagcttggcactcttattccaaagtctaatgatcctgatatgcgctggaacaaaggaaccattctaaaagcatcagtggagtacatcaagtggctacaaaaagaacaacagagagcccgagaattggaacacagacagaagaaattagagcaggctaacaggcgacttctacttcggattcaggaactagaaattcaggctcgtactcatggtctgccaaccctggcttcacttggcacggttgatttaggtgctcatgtcaccaaacagcagagccatcctgagcagaattcagtagactattgccaacaactgactgtgtctcaggggccaagccctgagctctgtgatcaagctatagccttttctgatcctttgtcatacttcacagatttatcatttagtgctgcattgaaagaggaacaaagattggatggcatgctattggatgacacaatctctccatttggaacagatcctctgctatctgccacttcccctgcagtttccaaagaaagcagtaggagaagtagctttagctcagatgatggtgatgaattataagaaataaacagacccaattcatcaactggaaagcaattctatgctggtgctatgcaattatgctctgtgtttcatatgttgctttggcttattttttttcttaaaggaatgtgttgttcatgaaaaactgatagaagcaacagaagaattcgcaggaagaaaaatcatagtgttaatgaattattgagggcgaaaaaaaggtgttttcttctttgactacggagtccaaatccacttaaattctgttttcctgaaaagaggtacagcataagaaatagctctttattgatgttttaaaagcagcaacttggtggtgtactactggaactaatgactgcaaagtgttaaacgactgaaatatacaaacagtctcttagttactcatttccatcttctcttcaactttcacatcagtcttccggaatcaagatcaacatatcaggtggtcattgcctttctccattgtctagtagacatgtctaaagttcaaactttataggataaataaatgtataatagattatctgtcacttgtggttgaaaggcaaatctacaataaatgtgagaattttccacaataaaatatggataacttataaaaacattggttactaaaattagatcctcattttattgtagttggttcaattacactaattctaaaagcatccatgcatatttatatctccagtctctgttcaggaaaaggaacatattgaatattttcctcaggaatatggaccagaattgtatcccttcacacaaacatacacatacacatatgcacatcattcaggtagtatatgttcttttgttttcttcatgcttctgactgcatcagaatcacattccaaattctcttttcttatgaagaagagatgtcagatcatcaattttagtaaataaaatataaaatgtccccctgcaaggacagttttcaggtacttaaaacttttcatcagtattggacagaaatcaattagttgttgatttggtttttctccaaatggataaaatattgaaaattgaattgccaattgacaaaataattattacaacaaactatttcttattattttcagttctgagaggaacgtaaggttctatttctataaacacttagagtgtcctatgatctttggttgcactgttagcatttattataagcacttataactatgatgcttcatttagatttttatctcttgcgcttgttttaggttaggaaattaagttaccaagcacgttgctctgtgctggacctccaagagtgatcatccgatcaatgagtattcatggaggcatactcagaactgcagtgagtcctgagaaaatgtagaagagttgaaaaagatatggtcttactcctaaggtagttaatgagaatgcatgaaaaacaaaaacaaaagatagaagacatatagaataaaaaatctaagcataaactgtaaatacagaaggtcagagaaaatgaaaatgactgacaaactttatgggaacagcagaatttgacttctctttgaaaggcattaattgagtgaaagtgagggcatataaaggaataataccaaccaaatgataaaagtgagaataataggggaagtatctttataggactttaattagaaagatctggatgccctagaagatgtctgttggggagttctgaagcataagactgacaacaggttgtgaaggcccttagaaaactatggtgaaataatatagtattaatataatagaaacaaatctttttagtagcagggaggatgctaaaaactaaaatatatattactaatgagtgagatgtaatctttcatgaatattaagctttgggataaattttgaaaggatcttttagttgcttctcacatggaaaatatgtcactatgaaatgtgagaccctaatgctgataaaagtagaaaaatagtaaatcattatggtataataattatctcaggcttagcttgtatcatttgctcagaatttggagaattaaaataattttattgtttgacatggaaaaataattactaacttctgggtacagtcattaaagcctgatagataaattcatctgaaatatgccatgtgaaacagctattagatacatcttctcaataattttcaagacgatattacatacttttaattttataacaaaattccacttcattatctgagttgataatttgattaaatgttaaaaattatagataaggaatatattttggagttcatagaaaacacaccactttattagatagagactggcttcagttctcattttatctgctcttctcatttcttcatattttgagtagacttgcactgatgatgtcattactcagtcattattttctgttctgttaaggtacaactactgggccttgaaatctatccttcacaatcttggctgagataaggacttggcacaggatgatagagcctggacacaagagatctggagagggaactgctatttgctgctacattcagattatgagatgtcagggaactgtaaaaagggtaatgaatttttaaagagagtaaagagttatgctgtgtcccggtcaactgaaatacattaaaaattaattagatggtagttcttaactttttaaggcagataccttgagaatctagtgagttatagaccctctccctagaaaagtatagaactgtttatatggacaataattcacatgcattcagagatcttagggatctcctgaatgttttcttggatcccaagtgaaaaattcctgaatcaggtctcttaggtgtgcggttaatgtcatgtataacaatggggggacccttacttatctaaatataattatcccaatcctaataatgatgaggttgcataggaaagtaatagtgtaccaaactttagattattcactaaaaaagttgttcatttatgaagtagtcgtttatcaaacatgtcctccccactcagcaaactatgccttctatttattatatatgggtcagtttcactataattactgagtgttataaacatctgaccataacattttgaaatgatgcaaataaatttccaaacaaaaatagtgtgaatttaaaagcaaattatttgagtatctaagaaacaagatagacttctagaaaaatttgactctctagaatatttcttgcagaaatgagatttttcataatagtaaaagaggcatatgtttatcaaacaatgctgtcacaaaaagcatcaactgtaatgggactattaatgcataattattgatttattcattcaattaatatacaattatcccttttcatttaaagatttaattcataattacaattataataaaacttcctttaaagtaagatacaataattttattgtttttcattcttttttcaacaaaatatcccatccaatcattttttatattattaaatattggctgctttttcttggattcacattaaacagccctttccaacttccaattgtcttaaaataatgatgacctcctgtgagtagatacagctctttacaatttttttctttagtgccttttcttcttgaatttttcctatatcaaatggagaatatatgtacagatggtattttctcagtttataggcatatcagtgaccatggctttctttatataggtttttaaaaaagccctaaataataaatagccagatgagctggggacattgagaaatagccttcctcttcctttttcaactcatttttttcccacctacatgactgtaaatcaaatatttaatagctcttacttaaaaaaacagatacaaagaatgtcttgatttggtgtgctcatttaccataatgtcatgaggggaattagatttcacaactttaaaaggaatatatttttattttattttgaaaaactgagtcatataggaattttcttatacttcaaggcatcatggaaacacttttttcctgtttggatattgtggaatttaaacgttcaaataaataaatggcataactaagtgttccaaatttttttacaatgtctttgaccctattcaaacactttaggtatttactgaccgtctgatgtgtaagatgtggaataaaactggaatcaattaattatttcactgtgttatcagcgcaagatcaaccatctgggtttcttaaagacacccgaaggattgaattttgtttcagtattgataatggcatagtctctatgtgctacatggaattacatcatttatccctccagtgccctatatgttgataagtatgtcagtttgacttagtatacatatatacagagatttcattacatttacctaataaatacaaaatacatttcgagtgttactgatctcctatgttacatgagcctcctgtaatcattgtgcattgatgttccaatgttttattgtttgtatgaattttaatttgaaaacaaggaaacaatccaaaagcagaaaaaatagcttttcttaaaattttcagtgctacattttccctctgaggtccatagagatttgaatgtataggagattatccgaaaacagctattttgattaaaaaatatatctcccaggattcaaccaacttaatgatgaagtactattgtctactgctttatacataaaagggaactttttatctgcttgtaaagggatttttatgtgtatttctgcataatcagatgacttctattgtgttttctactgatgaaattctctgtaaaatgtctttttcttacattatccaacaggcataaagaataacagtaaagacttttgtgtttgtaatactacctcttttatccctgcactactgttttattgcaaaaattctatattgtcactgtattttttccatagaatataaattttgttcttgtgctaaagctggtagtttatgtagcagacaaaatatacaaataaaagaagagactgattttgctgaaagaattatatataatcaagaagttacatattgttctttaaatatgatactgaattttaaaagcaaacgaaattcaagaatcttatctaacagcatagcagttgcttatggcatacaaggctaaaattaattcagctatttaatcttaataattattatgtagttaaaaatctttgactttaatagtgttttacatatacaaatagctgaagtaacattcctataattttaatctgacattggttagatcaagaaaacattgttaataagactgtagaatttgtaattattgctatttttcatttttaataacaaagtaatgtgtcttattttctaagaaaatggagaactttggtgtactttaatacatacaaaaatctttgtaaaaataccttaaaatgtaccaatattttctttgcatatattaaatgaaagactataattatgaaatgtt

SEQ ID NO: 1063 - DNA, 1812 bp, Homo sapiens
ggagaataaaataatcaggaggctgggtttgtgcttggctccaagcatgccctgctctctgacctggagactaccacctcgcacatgccaaggtcaggggctcccaaagagcgccctgcggagcctctcacccctcccccatcctatggccaccagccacagacagggtctggggagtcttcaggagcctcgggggacaaggaccacctgtacagcacggtatgcaagcctcggtccccaaagcctgcagccccggcggcccctccattctcctcttccagcggtgtcttgggtaccgggctctgtgagctagatcggttgcttcaggaacttaatgccactcagttcaacatcacagatgaaatcatgtctcagttcccatctagcaaggtggcttcaggagagcagaaggaggaccagtctgaagataagaaaagacccagcctcccttccagcccgtctcctggcctcccaaaggcttctgccacctcagccactctggagctggatagactgatggcctcactctctgacttccgcgttcaaaaccatcttccagcctctgggccaactcagccaccggtggtgagctccacaaatgagggctccccatccccaccagagccgactggcaagggcagcctagacaccatgctggggctgctgcagtccgacctcagccgccggggtgttcccacccaggccaaaggcctctgtggctcctgcaataaacctattgctgggcaagtggtgacggctctgggccgcgcctggcaccccgagcacttcgtttgcggaggctgttccaccgccctgggaggcagcagcttcttcgagaaggatggagcccccttctgccccgagtgctactttgagcgcttctcgccaagatgtggcttctgcaaccagcccatccgacacaagatggtgaccgccttgggcactcactggcacccagagcatttctgctgcgtcagttgcggggagcccttcggagatgagggtttccacgagcgcgagggccgcccctactgccgccgggacttcctgcagctgttcgccccgcgctgccagggctgccagggccccatcctggataactacatctcggcgctcagcgcgctctggcacccggactgtttcgtctgcagggaatgcttcgcgcccttctcgggaggcagctttttcgagcacgagggccgcccgttgtgcgagaaccacttccacgcacgacgcggctcgctgtgcgccacgtgtggcctccctgtgaccggccgctgcgtgtcggccctgggtcgccgcttccacccggaccacttcacatgcaccttctgcctgcgcccgctcaccaaggggtccttccaggagcgcgccggcaagccctactgccagccctgcttcctgaagctcttcggctgacagcccgctcggctcgccctctcccccggaggccgcgccctcccggaaaagccgggtcctccagaccccgaggccttgctctcagagcgggaggccccacccactggagagccccgcccctaaggtactatgagtcctcaggggtcaagttcagaaacggcccagccagacctaaacccacacgcccacaaagtggattgcacacagacaagaactcccgtgcgggcctccactctattcccacccttgagggagcccccttactgggggagggtccttgcaattccagcgaatcggaggccaggccaggacgtccttgctccctgcaccctcactgttctgtgcactttttctacctacataaacacacgcattccacctctcaaaaaaaaa

SEQ ID NO: 1064 - DNA, 1618 bp, Homo sapiens
tctgacagcgccgaggtgcgccgagcaggagcagggaacaaaggagcggagaggggaggggagagagttgggcgagggagagcccccggccggctgccagaagatcccggcgggaggaagcccaagtgtcacttgaattccacccaaggagcgggcgcctgggatcagagcgtcctgtttagcaataacggctggagcacgtcctacaagttacgggagagtcggctgtgaaggagacgttcgcttatcccctgtgtccccgctcctggcccctccagacccccgccttgcctcgcgctgggaggggagatccagaatgaaaggcaagaaaggtattgttgcagcatctggcagtgagactgaggatgaggacagcatggacattcccttggacctttcttcatccgctggctcaggcaagagaaggagaaggggcaacctacccaaggagtctgtgcagattcttcgggattggctgtatgagcaccgttacaatgcctatccttcagagcaagaaaaagcgttgctgtcccagcaaacacacctgtctacgctacaggtctgtaactggttcatcaacgcccgccgcaggctcctccctgacatgctgagaaaggatggcaaagatccaaatcagttcacaatttcccgccgtggggccaagatttctgaaacgagctctgtggagtccgtgatgggcatcaaaaacttcatgccagctctagaggagaccccatttcattcctgtacagctgggccaaacccaaccctagggaggccactgtctcctaagccgtcatccccgggatcagttttggctcgtccatcagtgatctgccataccactgtgactgcattgaaagatgtccctttctctctctgccagtcggtcggtgtgggacaaaacacagatatacagcagatagcggccaaaaacttcacagacacctctctcatgtacccagaggacacttgtaaatctggaccaagtacgaatacacagagtggtcttttcaacactcctccccctactccaccggacctcaaccaggacttcagtggatttcagcttctagtggatgttgcactcaaacgggctgcagagatggagcttcaggcaaaacttacagcttaacccattttcaagcaaaacagttctcagaaatgtcatgattgccggggtgaaggcaagagatgaattgcattattttatatattttttattaatatttgcacatgggattgctaaaacagcttcctgttactgagatgtcttcaatggaatacagtcattccaagaactataaacttaaagctactgtagaaacaaagggttttcttttttaaatgtttcttggtagattattcataatgtgagatggttcccaatatcatgtgattttttttttcctccccttccctttttttgttattttttcagactgtgcaatacttagagaacctatagcatcttctcattcccatgtggaacaggatgcccacatactgtctaattaataaattttccattttttttcaaacaagtatgaatctagttggttgatgccttttttttcatgacataataaagtattttctttaaaaaaaaaaaaaaaaa

SEQ ID NO: 1065 - DNA, 1990 bp, Homo sapiens
aaggaacggacagcccgacctcttaggcgccgggaccctcaggctcagatcagtggccgaaggccccagagtttgcaaactcagctctggagttcagcagcaacagcagcaggaaaaacctgcccctgctcccccctcccgccacctcccctctcctcttctcccctcacccagcaggcacccccggttcccgccaggccctcctgccatgtcggacccagacgtccccaggggctcggatgtccccgccatgtggcccccttgttccaggggtgcctgagccccttcaaggagccccaacccacccccaaccttggcccagccctgagccccagggaccatgagcgggggcaagaagaagagtagtttccaaatcaccagcgtcaccacggactatgagggccctgggagcccaggggcttcggatccccctaccccacagcccccaaccgggcccccgccccgcctgcccaatggggagcccagccccgatccggggggcaagggcaccccccggaatggctccccaccacctggggccccttcctcccgtttccgggtggtgaagctgccccacggcctgggagagccttatcgccgcggtcgctggacgtgtgtggatgtttatgagcgagacctggagccccacagcttcggcggactcctggagggaattcgaggggcctcagggggcgccgggggcagatctttggattccaggttggagctggccagcctcggcctgggcgcccccaccccaccgtcaggcctgtctcagggccccacctcctggctccgtccaccccccacctctcctggacctcaggcccgctccttcactgggggactgggccagctggtggtgcccagcaaagccaaggcagagaaacccccactgtcggcctcctcaccccagcagcgccccccagagcctgagaccggtgagagtgcgggcacatcccgggctgccacgcccctgccctctctgagggtggaagcggaggctgggggctcaggggccaggacccctccactgtcccggaggaaagctgtagacatgcggctgcggatggagttgggtgctccagaagagatggggcaggtgcccccacttgactctcgccccagctccccagccctctacttcacccacgatgccagcctggttcacaaatctccagaccccttcggagcagtagcagctcagaagttcagcctggcccactccatgttggccatcagtggtcacctagacagcgacgatgatagtggctccggaagcctggttggcattgacaacaaaatcgagcaagccatggacttggtgaagtcccacctcatgtttgcggtccgggaggaggtggaggtgctgaaggagcagatccgggaattggcggagcggaaacgtgcgctggagcaggagaatgggctgctgcgcgccctggccagcccggagcagctggctcagctgccctcctcgggggtcccacggcttgggccccctgcgcccaatgggccctccgtctgagcctcccttcccttacaatgtgcctttggggctgcccggccttgcgtcagccgcctgccccctcttcctatgcagctttaatgtccccgtgtccccggggtgggagttcaaggctcagtaatggcctggtcccccggcccctgccccatctcctcatcatccccagccttgatggaggagggagggcttcaggacggggcgtcagagggagccccctctgggagggaaccaacccccaccctccctcctgggaccccccagcagtagacggcttgggggagtcggaggctccccggcagacaccccacccccatcttgttcccttgaggtgcctcctctcctctgcccaggggagggagtgtggacagtatctggaagttctgggattcaggttgttattaaaataataataataattaaaaactctgaagaaacttgaaaaaaaaaaaaaaaaaaaaaaaa

SEQ ID NO: 1066 - DNA, 2474 bp, Homo sapiens
cgcctctgccggaggagccgcggggccgccacactcgccccccgccccccccgcgctcactcgcactcacacccgggcgcaggaggcgggcggcccgggccccaccggccccccatggacgcccccagcacggggcgctgagacccccgcgtcgctgcccagcccggtccggcgcgccacgccgagggatctctggacaggacaagactccgaagctactcccccagcacacagcccgggacccacaaacccagcttgcccccagccctcccacctgccactccctggcccctcccaccgcccgccccccttggggcgcagggcatggtgtgaaaggccaagtgctgaggcgggtatcatgggtgctgtgccctagggcctgggtggcagggggtgggtggcctgtgggtgtgccgggggggccagtgtgcccaccccagtctcttggcgtgctggagggcatcctggatggaattgaagtgaatggaacagaagccaagcaaggtggagtgtgggtcagacccagaggagaacagtgccaggtcaccagatggaaagcgaaaaagaaagaacggccaatgttccctgaaaaccagcatgtcagggtatatccctagttacctggacaaagacgagcagtgtgtcgtgtgtggggacaaggcaactggttatcactaccgctgtatcacttgtgagggctgcaagggcttctttcgccgcacaatccagaagaacctccatcccacctattcctgcaaatatgacagctgctgtgtcattgacaagatcacccgcaatcagtgccagctgtgccgcttcaagaagtgcatcgccgtgggcatggccatggacttggttctagatgactcgaagcgggtggccaagcgtaagctgattgagcagaaccgggagcggcggcggaaggaggagatgatccgatcactgcagcagcgaccagagcccactcctgaagagtgggatctgatccacattgccacagaggcccatcgcagcaccaatgcccagggcagccattggaaacagaggcggaaattcctgcccgatgacattggccagtcacccattgtctccatgccggacggagacaaggtggacctggaagccttcagcgagtttaccaagatcatcaccccggccatcacccgtgtggtggactttgccaaaaaactgcccatgttctccgagctgccttgcgaagaccagatcatcctcctgaaggggtgctgcatggagatcatgtccctgcgggcggctgtccgctacgaccctgagagcgacaccctgacgctgagtggggagatggctgtcaagcgggagcagctcaagaatggcggcctgggcgtagtctccgacgccatctttgaactgggcaagtcactctctgcctttaacctggatgacacggaagtggctctgctgcaggctgtgctgctaatgtcaacagaccgctcgggcctgctgtgtgtggacaagatcgagaagagtcaggaggcgtacctgctggcgttcgagcactacgtcaaccaccgcaaacacaacattccgcacttctggcccaagctgctgatgaaggagagagaagtgcagagttcgattctgtacaagggggcagcggcagaaggccggccgggcgggtcactgggcgtccacccggaaggacagcagcttctcggaatgcatgttgttcagggtccgcaggtccggcagcttgagcagcagcttggtgaagcgggaagtctccaagggccggttcttcagcaccagagcccgaagagcccgcagcagcgtctcctggagctgctccaccgaagcggaattctccatgcccgagcggtctgtggggaagacgacagcagtgaggcggactccccgagctcctctgaggaggaaccggaggtctgcgaggacctggcaggcaatgcagcctctccctgaagccccccagaaggccgatggggaaggagaaggagtgccataccttctcccaggcctctgccccaagagcaggaggtgcctgaaagctgggagcgtgggctcagcagggctggtcacctcccatcccgtaagaccaccttcccttcctcagcaggccaaacatggccagactcccttgctttttgctgtgtagttccctctgcctgggatgcccttccccctttctctgcctggcaacatcttacttgtcctttgaggccccaactcaagtgtcacctccttccccagctcccccaggcagaaatagttgtctgtgcttccttggttcatgcttctactgtgacacttatctcactgttttataattagtcgggcatgagtctgtttcccaagctagactgtgtctgaatcatgtctgtatccccagtgcccggtgcagggcctggcatagagtaggtactccataaaaggtgtgttgaattgaaaaaaaaaaaaaaaaaaaaaaaaaaaaaaaaaaa

SEQ ID NO: 1067 - DNA, 3735 bp, Homo sapiens
ctccctcgagtccctgagtctctgtagtgcctcagctcctggatgtcctcccttaaaggagaagaacaatgcgggccgactagacgagtcccttagtttcctcgccggcgcagacaaatacggtttcagtccaaggaactaccattcccagaagacagcggggcgttccttgctgcatttctattggttggcgtttgttactcccagccaatagaaagtgagcttcttgacaagtgccaaaatggcgatgcctaccacctagaactggattgtgcgctggccgccaccgctgccacctgctcagagtgaaataatgaaggtggtcaacctgaagcaagccattttgcaagcctggaaggagcgctggagtgactaccaatgggcaatcaacatgaagaaattctttcctaaaggagccacctgggatattctcaacctggcagatgcgttactagagcaggccatgattggaccatcccccaatcctctcatcttgtcctacctgaagtatgccattagttcccagatggtgtcctactcttctgtcctcacagccatcagtaagtttgatgacttttctcgggacctgtgtgtccaggcattgctggacatcatggacatgttttgtgaccgtctgagctgtcacggcaaagcagaggaatgcatcggactgtgccgagcccttcttagcgccctccactggctgctgcgctgcacggcagcctctgcagagcggctgcgggaggggctggaggccggcactccagccgctggggagaagcagcttgccatgtgccttcagcgcctggagaaaaccctcagcagcaccaagaaccgggccctgctgcacatcgccaaactagaggaggcctcttcttggactgccatcgagcattctctcttgaaacttggagagatcctggccaatctcagcaacccgcagctccggagtcaggccgagcagtgtggcaccctcattaggagcatccccacgatgctgtctgtgcatgcggagcagatgcacaagaccggcttccccactgtccacgccgtgatcctgctcgagggcaccatgaacctgacaggcgagacgcagtccctggtggagcagctgacgatggtgaagcgcatgcagcatatccccaccccactttttgtcctggagatctggaaagcttgcttcgtggggctcattgagtctcccgagggtacggaggagctcaagtggacagctttcactttcctcaagattccacaggttttggtgaagttgaagaagtactctcatggagacaaggacttcactgaggatgtcaactgtgcttttgagttcctgctgaagctcacccccttgttggacaaagctgaccagcgctgcaactgtgactgtacaaacttcctgctccaagaatgtggcaagcaggggcttctgtctgaggccagcgtcaacaaccttatggctaagcgcaaagcggaccgagagcacgcaccccagcagaaatcgggagagaatgccaacatccagcccaacatccagctgatcctccgggcggagcccactgtcacaaacatcctcaagacgatggatgcagaccactctaagtcaccggagggactgctgggagtcctgggccacatgctgtccgggaagagtctggacttgctgctggctgccgccgccgccactggaaagctgaaatccttcgcccggaaattcatcaatttgaatgaattcacaacctatggcagcgaagaaagcaccaaaccggcctccgtccgggccctgctgtttgacatctccttcctcatgctgtgccatgtggcccagacctatggttcagaggtgattctgtccgagtcgcgcacaggagctgaggtgcccttcttcgagacctggatgcagacctgcatgcctgaggagggcaagatcctgaaccctgaccacccctgcttccgccccgactccaccaaagtggagtccctggtggccctgctcaacaactcctcggagatgaagctagtgcagatgaagtggcatgaggcctgtctcagcatctcagccgccatcttggaaatcctcaatgcctgggagaatggggtcctggccttcgagtccatccagaaaatcactgataacatcaaagggaaggtatgcagtctggcggtgtgtgctgtggcttggcttgtggcccacgtccggatgctggggctggatgagcgtgagaagtcgctgcagatgatccgccagctggcagggccactgtttagtgagaacaccctgcagttctacaatgagagggtggtgatcatgaactcgatcctggagcgcatgtgtgccgacgtgctgcagcagacagccacgcagatcaagtttccctccaccggggtggacacaatgccctactggaacctgctgccccccaagcggcccatcaaagaggtgctgacggacatttttgccaaggtgctggagaagggctgggtggacagccgctccatccacatctttgacaccctgctgcacatgggcggcgtctactggttctgcaacaacctgattaaggagctgctgaaggagacgcggaaggagcacacgctgcgggcagtggagctgctctactccatcttctgcctggacatgcagcaagtgaccctggtcctgctgggccacatcctacctggcctgctcactgactcctccaagtggcacagcctcatggaccccccgggcactgctcttgccaagctggccgtgtggtgtgccctcagttcctactcctcccacaagggacaggcgtccacccgccagaagaagagacaccgcgaagacattgaggattatatcagcctcttccccctggacgatgtgcagccttcgaagttgatgcgactgctgagctctaatgaggacgatgccaacatcctttcgagccccacagaccgatccatgagcagctccctctcagcctctcagctccacacggtcaacatgcgggaccctctgaaccgagtcctggccaacctgttcctgctcatctcctccatcctggggtctcgcaccgctggcccccacacccagttcgtgcagtggttcatggaggagtgtgtggactgcctggagcagggtggccgtggcagcgtcctgcagttcatgcccttcaccaccgtgtcggaactggtgaaggtgtcagccatgtccagccccaaggtggttctggccatcacggacctcagcctgcccctgggccgccaggtggctgctaaagccattgctgcactctgaggggcttggcatggccgcagtgggggctggggactggcgcagccccaggcgcctccaagggaagcagtgaggaaagatgaggcatcgtgcctcacatccgctccacatggtgcaagagcctctagcggcttccagttccccgctcctgactcctgacctccaggatgtctcccggtttcttctttcaaaatttcctctccatctgctggcacctgaggagagtgagcagcctggaccacaagcccagtggtcacccctgtgtgcgcccgccccagcccaggagtagtcttacctctgaggaactttctagatgcaaagtgtgtatgtgtgtgtgtgtgtgtgtgtgtgtgtgtttgtgtgtattttgtaatatgtgagggaaatctaccttcgttcatgtataaataaagctcctcgtggctccctttgtgaaaaaaaaaaaaaaaaaaaaa

SEQ ID NO: 1068 - DNA, 7416 bp, Homo sapiens
cggcggggattaactttgcatgaataatgtgagtgcgcttggaaaagagacctcctgctccgcgggctcggggcaagagcccgcaggctaccttccccgggcaggggcgctcaacccaaccggctccagggcactggtaatttggctagaggaccgcgcggaggcagcgggatctgcgatttccttctggttggctgtcctgcgtgggtgccaagttccacacatgatttaatgaataagaaggagatgtcagtgaaaaaagggatccagaatgattactaacctatgactcccaacagtatgacagaaaatggccttacagcctgggacaaaccgaagcactgtccagaccgagaacacgactggaagctagtaggaatgtctgaagcctgcctacataggaagagccattcagagaggcgcagcacgttgaaaaatgaacagtcgtcgccacatctcatccagaccacttggactagctcaatattccatctggaccatgatgatgtgaacgaccagagtgtctcaagtgcccagaccttccaaacggaggagaagaaatgtaaagggtacatccccagttacttagacaaggacgagctctgtgtagtgtgtggtgacaaagccaccgggtatcactaccgctgtatcacgtgtgaaggctgcaagggtttctttagaagaaccattcagaaaaatctccatccatcctattcctgtaaatatgaaggaaaatgtgtcatagacaaagtcacgcgaaatcagtgccaggaatgtcgctttaagaaatgcatctatgttggcatggcaacagatttggtgctggatgacagcaagaggctggccaagaggaagctgatagaggagaaccgggagaaaagacggcgggaagagctgcagaagtccatcgggcacaagccagagcccacagacgaggaatgggagctcatcaaaactgtcaccgaagcccatgtggcgaccaacgcccaaggcagccactggaagcaaaaacggaaattcctgccagaagacattggacaagcaccaatagtcaatgccccagaaggtggaaaggttgacttggaagccttcagccattttacaaaaatcatcacaccagcaattaccagagtggtggattttgccaaaaagttgcctatgttttgtgagctgccatgtgaagaccagatcatcctcctcaaaggctgctgcatggagatcatgtcccttcgcgctgctgtgcgctatgacccagaaagtgagactttaaccttgaatggggaaatggcagtgacacggggccagctgaaaaatgggggtcttggggtggtgtcagacgccatctttgacctgggcatgtctctgtcttctttcaacctggatgacactgaagtagccctccttcaggccgtcctgctgatgtcttcagatcgcccggggcttgcctgtgttgagagaatagaaaagtaccaagatagtttcctgctggcctttgaacactatatcaattaccgaaaacaccacgtgacacacttttggccaaaactcctgatgaaggtgacagatctgcggatgataggagcctgccatgccagccgcttcctgcacatgaaggtggaatgccccacagaactcttcccccctttgttcttggaagtgttcgaggattagactgactggattcattctcataattcctacagcactactgggtgtcatttcattccattgcctagctcttttttgtttgtttctttgtgttgggagggattatttgggagggaaaagggaagtagtccttggcatagacatggatgaaattgccccttgaatgcgggtacttgaaactattgcatttcgttctccggtcctgtgatgtgaatgctctgaaggttttatggttgtggaggtggggtgggggacaatcattaactcaccagcaccaagcatcaccagctcccacccgtccctggtccaagacttgagtcagcaaaatggcgccacaggacactaaagaagccttaaaaccaagataatacgaccacctccacccaatcctgatgttcgcagggctgaagttaacagagcacagaccacctttagttagatgtggctttcagccttttagggaaagactcgaacaaattttcatctattcaagagcatgctgtttgcagcactctttatggtctcctaggagcataacttggaatgtacaggaatatttgtgtcctaaaaaaatcagctgcccttccaatatcatttttataacgttatggtttaattcaagttatacaaaggtgtgactcaaggatgtgcaggtattgactgatggaggccaacaaggaaaatattttttttcagtgagcccagagaaattagaaatcttcaccaatgtcagtgactgcatggtttccaaaaattcacatagtattacctcacagtaggaaggcttctttcccatttaggctcagagaacacttttacagaaatcaaacctatttacagggtggcaccccttttctgtggcatctgatctgtcatctcccaagctcctgaagttctttatccaggttgtatctttgctgagctgacaacagatttctctatggatcaaatattctaatcaaggaaagatacggtgaaacttcagtcttcttctggagaaatgctgaggcgagattagtgcagctacattctgagttgaaggaaatgcagtgttctgagggcccctttgtgtcctgatggctggaggacgcttcctcctggttagatcctcaagctccttgcctcattgacaaatgtctcctagtcccctttttccctctgactctgaggaactaaatagcttgactatctctaaacagagactggccctgccactgaccctcctgtccctctcatagcataccctgacagatactcaatagaaaacacctgcagaccatgtgcacacttaactttcctgcccaacctgcctccccaacggcccatgctagaatagcttgtgcccagaaaacaaacagtgacacttcatctcttcagcgtcagaaaatgggcatagaatgtacccatgcaattgaatgtatctcattctccactggcatagtagatataaactattcctttgcctaccttttactgccttatcctggaaatattggggaaaataagccatatcagtgagatttacctaaaaacaaaggaaggaaagtcactatggaaaccaagtagatgctttttgtaagtttggtggagcataactggcccagaagtctgggtgcctgagttctagttcgtgctctgtcaactggtagatttgtaattctaggtcttggttttcttacctggtgaataagtcatgatctctaaaacccttcctgcccttaatattgtctgaatttcaaggggaaaaaaaaaatctggttcctttaattatttttttttaacacttaaattcctaactttattagacaagaagtatggcccacttaacagttaaggaacgtaaatttgttattggctcgaaataataatttgacacaatactagtcaaccatttagaggccttggaaaaagaagaggaacagcactgaaaattccaagtatgattggaaattatctgggagcggggaattaaatattcaatgcatgaaagcaattgtactggcttctgggaaaaaggaaacaagaacattgctatggaacttgttacccagagaaaggaagtgaaaagatttacaattataagcacgaaattcattggcagattacctgctttatctacagacagattgttttggggtttggttttgtctaggcagcctctggccaggctccttaattgcttgctctgctaatatttcagcttcctctcttgactccttgaggaaccaaccgctctttggaagacaaacacttagccacctctgtgctccagggtaaccctgagaagctctgctgtctggggcaagctttctttccaaagggaatgagaggaaggcaagcaggcagggtcctgcagcgtcaggccttctggggaaagtttcctcattttgtttgacagggtcctcagtacatcagacacccagatttgaatataagttcagagcctgatctcaagctaaatcagaatgctttggggactaaccatgatcgagaattggccaaatagtatggcatataaacagccatccagccagccgcaagtaaaggaacgtttgatccttggcaccttaaatgattgattgccttcaataggcaaactgctggtctggaaatctcgttgaaggctgaatacttcatgcggagtaggacaagccttagcccaccttcaggttgaaaggaaaggccataggactcaaaagataatgactctgaaactaaactccttccttctgaagctgacagaggtacttagtgcatctcaagactccatctcataaaactcatttgtgagggatttgctctagatttttctaaacattttttcatctattgtccagacttgcaaatccagtgtggacctgatggagatacccttcacacctgcgctcccaccccctcggcagggagacgtctcagtagaggagaacacacccattatgctgggatttgtatttataaatcacttcccttttagggatgagcggtgtggggcgtgtgtgcgtgtgagtgtatgcgcgtgcgtgtgtgaccctcaagtgtactttgctcaatttagacgtgcagtatttccagaaacaatgaaaaaagtaagatgttttcttctttatgattctgctcaaaacaccacgtgccgcctcagagctttttctagagcctcggtcctcaatgacgcgcttgacctgttgatgcctcagcccagcgaagcccctcacctgtgccccgggcgacagctcttcagtgtgcagtgcaggcctggggtggactgccaggccttcgctctgtgccagcaacgccgttcttgttgctcctccatgaacaggggtacaagccctggcccctcctcgacactaagccccccacagactcagcctccaaggaaccgctgagcacccttgaagcatgtcattgtcagtgatacctttttattctatggaactctaacctattcgtgtcatattgaccttttgctgcatgagtcataaattatgaaatcagtcttacagtttttgaaatgtagccagcatttgtaaggctaaacctttttcatgaactgaatttaagtgaataaccaagccacagttcctcctcaaatggagagtgatgatcgacatttgaatctctttgccctttccaacggctatggcatcaggttctaaaataagctcgtaatttttcctgttattttaataatatggaaatattagcatagtgtttcttttgatagtgatagactataatccatatttaaattttatagagaagaaattttattgtactgtgatgtagatatttattatccaggtaaggatttgcccggtgtgtattttttacaattgagacattttactttaatctttaaaaaaaatgcattaaaaacacactcaaaaaaaaaaaaaaaaaaaaaaaaaaaaaaccagactgggggaaaaaaggtttggccttatcacagaatttttactgtgctgtataaatgtttgcaaatgcgaaaagtgtgcatttatagtgtgtttccacattaattaatgccgccttcaagagcaatattgtgcaggtaaaacgctgtttgtggctttctgttgcacagttaaagctgacccaccctatgcacaagacaatcaaatataaatctgtcctcctcaggatgcagataatactcatgtaaattatggagcacaatgtaagacaaaaggagacactttacatatgtattgttgatacagaaattatcagggcatgaatgagctgatgtgacattatgccacttctttcttttggttctcccttattaacttggcatttttaatttgaccatagagccaaattagttctccatgctttcttcgtagaaaatccttttttttcccataatgttttcatgccctgagaatcagaaaaatactacagaatagaaaaagatttacagtcattggaagatttgtgttttgcaaacagtgttaagtgatattgctagatggtgatatttttttcagcctaaaactctgttgaaatctgtgatcaaaatgttttaaactatccaaaaaaaatttgtatatttgggaaaaatggatttttacatagcttttgtatgcagatataaaactgtaattatgaatatagtgggcgtagataaactcataagcttaaattctaaaaaagaaaaagcttataacagatatattttcctgtctctttctttaaatattattattttctacataggcaaagagttgcctgctcttctcacttcagctgctgccaaaagacggaaccacggatgtaaggacatttatttcataaataaacatctactagaataagcaaatttacttgagaagaaactatggagggagagaagaaactaagtaaaatgctgatggggggttacctctttggaaggggccacaaagatgaagggaggagagaggtgaagttttgcagctcaaggacaacattcatcttctcatctcaaattattcaggaatattactaatggaattatgttaacatcagctgccaacatatatctcaatctctgttgccctgaacacatgttaattgagattctttctatgacaagtaacaaaaagctaactcaaactggcttaagcagaaagctaattattgactttaatatctgggatctagggtattgcataccaaagcttcaggcatggctggatctgggtgcacttactcagtattctcaggaagctcctttttttgtcattcatgtagacttaacattcacatggcctttcaccttacggtggcctccaatagctccaggatgagctttacagctccaaatatagtgaaaggagaatttcttttctccaacaattctaatgaaaattctggcctaattctcactggcccaagttcagtcatgtgcccattcctgagccaatcactgtggtgaggaaaacagatgcataaccaaccttatcctcaggaatcctggaactgggtgaggggaaagagggacagtcagcttcatctaaactatggactgagagttgaggcaagatgattcctgaaagaaaattctaagtcttgctgctataagtggaagagaatggtgggcaagcaaaagcaaccagtgcccacaccaaaggtaaatctaaaacaacatcccatttcagtacagcaagcggttctccttcacacagaggaagctcatctccaagtttttatttggccaggacatgaaccaaataaacaccttccaaagaaaaaaaaaaaaaaaaa

SEQ ID NO: 1069 - DNA, 2968 bp, Homo sapiens
aggctgagcggctacctgaatggggagggggcagacggcgctgagcgcggcggcggcgggagcggcgtcgagtgtctccgtgcgcccgtctgtggccaagcagccagcagcctagcagccagtcagcttgccgccggcggccaagcagccaaccatgctcaacttcggtgcctctctccagcagactgcggaggaaagaatggaaatgatttctgaaaggccaaaagagagtatgtattcctggaacaaaactgcagagaaaagtgattttgaagctgtagaagcacttatgtcaatgagctgcagttggaagtctgattttaagaaatacgttgaaaacagacctgttacaccagtatctgatttgtcagaggaagagaatctgcttccgggaacacctgattttcatacaatcccagcattttgtttgactccaccttacagtccttctgactttgaaccctctcaagtgtcaaatctgatggcaccagcgccatctactgtacacttcaagtcactctcagatactgccaaacctcacattgccgcacctttcaaagaggaagaaaagagcccagtatctgcccccaaactccccaaagctcaggcaacaagtgtgattcgtcatacagctgatgcccagctatgtaaccaccagacctgcccaatgaaagcagccagcatcctcaactatcagaacaattcttttagaagaagaacccacctaaatgttgaggctgcaagaaagaacataccatgtgccgctgtgtcaccaaacagatccaaatgtgagagaaacacagtggcagatgttgatgagaaagcaagtgctgcactttatgacttttctgtgccttcctcagagacggtcatctgcaggtctcagccagcccctgtgtccccacaacagaagtcagtgttggtctctccacctgcagtatctgcagggggagtgccacctatgccggtcatctgccagatggttccccttcctgccaacaaccctgttgtgacaacagtcgttcccagcactcctcccagccagccaccagccgtttgcccccctgttgtgttcatgggcacacaagtccccaaaggcgctgtcatgtttgtggtaccccagcccgttgtgcagagttcaaagcctccggtggtgagcccgaatggcaccagactctctcccattgcccctgctcctgggttttccccttcagcagcaaaagtcactcctcagattgattcatcaaggataaggagtcacatctgtagccacccaggatgtggcaagacatactttaaaagttcccatctgaaggcccacacgaggacgcacacaggagaaaagcctttcagctgtagctggaaaggttgtgaaaggaggtttgcccgttctgatgaactgtccagacacaggcgaacccacacgggtgagaagaaatttgcgtgccccatgtgtgaccggcggttcatgaggagtgaccatttgaccaagcatgcccggcgccatctatcagccaagaagctaccaaactggcagatggaagtgagcaagctaaatgacattgctctacctccaacccctgctcccacacagtgacagaccggaaagtgaagagtcagaactaactttggtctcagcgggagccagtggtgatgtaaaaatgcttccactgcaagtctgtggccccacaacgtgggcttaaagcagaagccccacagcctggcacgaaggccccgcctgggttaggtgactaaaagggcttcggccacaggcaggtcacagaaaggcaggtttcatttcttatcacataagagagatgagaaagcttttattcctttgaatattttttgaaggtttcagatgaggtcaacacaggtagcacagattttgaatctgtgtgcatatttgttactttacttttgctgtttatacttgagaccaacttttcaatgtgattcttctaaagcactggtttcaagaatatggaggctggaaggaaataaacattacggtacagacatggagatgtaaaatgagtttgtattattacaaatattgtcatctttttctagagttatcttctttattattcctagtctttccagtcaacatcgtggatgtagtgattaaatatatctagaactatcatttttacactattgtgaatatttggaattgaacgactgtatattgctaagagggcccaaagaattggaatcctccttaatttaattgctttgaagcatagctacaatttgtttttgcatttttgttttgaaagtttaacaaatgactgtatctaggcatttcattatgctttgaactttagtttgcctgcagtttcttgtgtagatttgaaaattgtataccaatgtgttttctgtagactctaagatacactgcactttgtttagaaaaaaaactgaagatgaaatatatattgtaaagaagggatattaagaatcttagataacttcttgaaaaagatggcttatgtcatcagtaaagtacctttatgttatgaggatataatgtgtgctttattgaattagaaaattagtgaccattattcacaggtggacaaatgttgatgttgtcctgttaatttataggcgttttttggggatgtggaggtagttgggtagaaaaattattagaacattcacttttgttaacagtatttctcttttattctgttatatagtggatgatatacacagtggcaaaacaaaagtacattgcttaaaatatatagtgaaaaatgtcactatatcttcccatttaacattgtttttgtatattgggtgtagatttctgacatcaaaacttggacccttggaaaacaaaagttttaattaaaaaaaatccttgtgacttacaatttgcacaatatttcttttgttgtactttatatcttgtttacaataaagaattccctttggtatatggaaaaaaaaaaaaaaaaaa

SEQ ID NO: 1070 - DNA, 4051 bp, Homo sapiens
gagggccgcgccggggcagagccgcgcgggcgggcgaggcgcgtgccggccgcaggagctccgggttgccgccgccgccgccgcccgcagcccacgtgcggccgctgctgcgcccgagctcacgccccgcggccgctttgttgctcccggccggcctgcacgatgcacacgccggacttcgcaggcccagacgacgcgcgcgcagttgacatcatggacatatgtgagtccatcctggagaggaagcggcatgacagcgaaaggtctacttgcagcatcttggagcagacagacatggaagctgtcgaggctcttgtttgtatgagctcctggggtcaaagatcccagaaaggtgacctgttgcggataagacccctcacgcctgtctctgactctggggatgtcaccaccactgtgcatatggatgcagccacacctgaactaccaaaagacttccattctttatcgactctgtgcataactcctcctcagagccctgatctcgtggagccatcgacaaggacacctgtttctccccaagtaacagattccaaagcatgtacagccacggatgttctccagtcctctgccgtagtggccagagctctgagcgggggcgcggagaggggcttgctgggtttggagccagtgcccagctctccctgcagggccaaggggactagcgtgatccgacacactggggagagccctgctgcctgctttcccaccatccagactccagattgccggctttctgacagcagagaaggagaagagcagcttctgggacactttgaaactttgcaggacacacacctcacggacagtttactcagcactaacttggtgtcctgtcagccctgcttgcacaagtctggtggcctgctgctcactgacaaaggccagcaggcagggtggcctggtgcagttcagacttgctcaccaaagaattatgaaaatgacctgcccaggaaaaccacccctctgatttctgtctctgtccctgctccccctgtcctttgccagatgatccctgtgactggacaaagtagcatgttaccagcttttttgaagccccctccccagttgtctgtggggactgtgagacccatcctagctcaggctgctccagcgcctcaacctgtgttcgtgggacctgctgtgcctcagggagctgtgatgttggtcctgccccagggagccctccctccgcctgccccctgtgcagccaatgtcatggctgccgggaataccaagttgttgccccttgcccctgctccagtgttcatcacctctagccaaaactgtgtccctcaggtagacttttcccgaaggaggaactatgtttgcagcttcccaggttgccggaagacctacttcaaaagttcccaccttaaggcccatcttcgcactcacacaggggagaagcctttcaactgcagctgggatggctgtgataaaaagtttgctcgttcggatgagctgtcacgccaccgcagaactcacacaggggagaagaagtttgtgtgcccggtgtgtgaccgacgtttcatgcgcagtgaccacctgacgaagcatgcccggcgccacatgacgaccaagaagatcccaggctggcaggcagaggttggcaagctgaacagaatcgcctctgcagagagcccggggagcccactggtgagcatgccagcctctgcctgaaaggtccattaggacatcactcatgggatttttaaaaagcctctttccaggaatggaactgatggattcctctcccactgcctcacccaaaaaaaacggtcttggcggcctaggggaagatcggggagctggttttgatgaaagtatgttaacttttcttttccacttgggaccctgttcagtatcttttgtagtttcagaagtttttttgttttggttttttttttaaagaaatggtagaaaatttgataatctgaatcaccagcattcaaacaaatatttcggcaataaagtttacaaaatctggatttttacaaccttttctattgatgttttgtagaaataagacagggtactaatttttatactggtttttagaaaaatatttatattgttggtgctcaaatcaccaatttctagctagatcattttgcagccttcttttcagtgtttaataacaaagtttttcctaatggcccttcttttagtaaactggacatgttattccactacaaaaaccacaagttatctggccttttagatctttttggaatcggacctggttgagtaaggacctcttaaaagggaaaaataaattttgccgtcagcttcttcataacgttttcaaggaaattctaggcaatcattcctgtcaccaaagaactaaaattttggttgactggaactagtgagctgtgtccatggtgtgtcatgaaggatgtaccccagagagtaacatgagccactgggcagatcccagggaccagtacttgctgcaggatctagtctgtaatagtcttggccatggctctgctgaaagcaagccattcagtttcttgtttgtacctaaaacaccaaaaaagaaacactcaaatccagctgctttgtcaattgtcagttctgactccttttgctgtggccttatccgtactatattgtgggtagagtaacttctcagaaaaaaaggaaatgtctgtattggttggatgaaactccaccagagcacagcttagctggggcgagatgcatgtgaaggcaggcagtgccaagattccgcttcctttgtttgccaaatactagaaacacaaggaaatgcaagttacgctaaatggcagtaatactacccaactgcctttctgttcattttgtttgaaggaaattgttttgaccaaacagaaaattacttggaatggtgtgttttacagtctacctagaaaatagatggacaatatttttcaactgtatgagcacgtagataaccgagagaatgtggccacctgtgttcaagaagccactgatactggtttttgttaaacattggaagttcaggcaatggaataaatgtaggaacatacagaatgttgcactaatttggtagcctgggaattttttttattgtgcagtatgtatttaaattttgtctatgttaattaccagcatttacctttatttaaatgatggtaaggtggaatattgaataaaattaggttttgtgttttgttctttgtagtctgataaaatctccacctggtcattcattgtgtgtgacttgatacctgttaacttgccccttagtatcagctgttacttgacacaaatgtgtgtgttattcagaggttttcagtctggacactccataggtgagtgtcgtgtcttcgtgagacagcacagttgtctcatgttgtgcatagttcatgtttcctcaccacccagtcctttctcctgctcatcaaaatcagcatacacatttttgactgtacacactataaatggcatcaaatttggatatttttcttaattatgacatgcaaagtaatgtgagtcctgccagtattctggtggataaggtcttttgagtatttggttgcttgtcacaacattctccaagcagtgatatttctaaagaggagatacatgttgaaaacggttttaatttacacttccatttcctgattacatttggaaatactttgtgtaaaccatcccccttccacctccatttgtctgttgaaagattttaagttggaaacagttcctgtctgaaaactcttctgagaaccacaaaccttgtgtatggattcggcatggagccctcagctggcggctctgggtgctgacggccgctggagaggtgggctcccctcgtgcactttattgcctgggcagttttgcttgatcttttgtgactttgagccttttaagtagtttgaatgataagacttaaaatgtttcataattatgttttatgtaacagactttgacattatttaaacgagcatgtgtaatgtaacttttctctttgaatcatataaaacttgattttacattgaaaaaaaaaaaaaaaaaaaaa

SEQ ID NO: 1071 - DNA, 3905 bp, Homo sapiens
gacagataccctccttccggccgcgccactcgggaggcggatcccgtgggcctgaggaggcttcccccgcccggtttgctttccctccctcgctggcgctgccgcgagtccaccgagcggcctctgaggagcagccgcaggaggaggaggaggtcgtcgggggcggcgggcggagaccgcgctctcgcttccccggcggcggcaagggcaggacaatggaggtggcggtggagaaggcggtggcggcggcggcagcggcctcggctgcggcctccggggggccctcggcggcgccgagcggggagaacgaggccgagagtcggcagggcccggactcggagcgcggcggcgaggcggcccggctcaacctgttggacacttgcgccgtgtgccaccagaacatccagagccgggcgcccaagctgctgccctgcctgcactctttctgccagcgctgcctgcccgcgccccagcgctacctcatgctgcccgcgcccatgctgggctcggccgagaccccgccacccgtccctgcccccggctcgccggtcagcggctcgtcgccgttcgccacccaagttggagtcattcgttgcccagtttgcagccaagaatgtgcagagagacacatcatagataacttttttgtgaaggacactactgaggttcccagcagtacagtagaaaagtcaaatcaggtatgtacaagctgtgaggacaacgcagaagccaatgggttttgtgtagagtgtgttgaatggctctgcaagacgtgtatcagagctcatcagagggtaaagttcacaaaagaccacactgtcagacagaaagaggaagtatctccagaggcagttggtgtcaccagccagcgaccagtgttttgtccttttcataaaaaggagcagctgaagctgtactgtgagacatgtgacaaactgacatgtcgagactgtcagttgttagaacataaagagcatagataccaatttatagaagaagcttttcagaatcagaaagtgatcatagatacactaatcaccaaactgatggaaaaaacaaaatacataaaattcacaggaaatcagatccaaaacagaattattgaagtaaatcaaaatcaaaagcaggtggaacaggatattaaagttgctatatttacactgatggtagaaataaataaaaaaggaaaagctctactgcatcagttagagagccttgcaaaggaccatcgcatgaaacttatgcaacaacaacaggaagtggctggactctctaaacaattggagcatgtcatgcatttttctaaatgggcagtttccagtggcagcagtacagcattactttatagcaaacgactgattacataccggttacggcacctccttcgtgcaaggtgtgatgcatccccagtgaccaacaacaccatccaatttcactgtgatcctagtttctgggctcaaaatatcatcaacttaggttctttagtaatcgaggataaagagagccagccacaaatgcctaagcagaatcctgtcgtggaacagaattcacagccaccaagtggtttatcatcaaaccagttatccaagttcccaacacagatcagcctagctcaattacggctccagcatatgcagcaacagcaaccgcctccacgtttgataaactttcagaatcacagccccaaacccaatggaccagttcttcctcctcatcctcaacaactgagatatccaccaaaccagaacataccacgacaagcaataaagccaaaccccctacagatggctttcttggctcaacaagccataaaacagtggcagatcagcagtggacagggaaccccatcaactaccaacagcacatcctctactccttccagccccacgattactagtgcagcaggatatgatggaaaggcttttggttcacctatgatcgatttgagctcaccagtgggagggtcttataatcttccctctcttccggatattgactgttcaagtactattatgctggacaatattgtgaggaaagatactaatatagatcatggccagccaagaccaccctcaaacagaacggtccagtcaccaaattcatcagtgccatctccaggccttgcaggacctgttactatgactagtgtacaccccccaatacgttcacctagtgcctccagcgttggaagccgaggaagctctggctcttccagcaaaccagcaggagctgactctacacacaaagtcccagtggtcatgctggagccaattcgaataaaacaagaaaacagtggaccaccggaaaattatgatttccctgttgttatagtgaagcaagaatcagatgaagaatctaggcctcaaaatgccaattatccaagaagcatactcacctccctgctcttaaatagcagtcagagctctacttctgaggagactgtgctaagatcagatgcccctgatagtacaggagatcaacctggacttcaccaggacaattcctcaaatggaaagtctgaatggttggatccttcccagaagtcacctcttcatgttggagagacaaggaaagaggatgaccccaatgaggactggtgtgcagtttgtcaaaacggaggggaactcctctgctgtgaaaagtgccccaaagtattccatctttcttgtcatgtgcccacattgacaaattttccaagtggagagtggatttgcactttctgccgagacttatctaaaccagaagttgaatatgattgtgatgctcccagtcacaactcagaaaaaaagaaaactgaaggccttgttaagttaacacctatagataaaaggaagtgtgagcgcctacttttatttctttactgccatgaaatgagcctggcttttcaagaccctgttcctctaactgtgcctgattattacaaaataattaaaaatccaatggatttgtcaaccatcaagaaaagactacaagaagattattccatgtactcaaaacctgaagattttgtagctgattttagattgatctttcaaaactgtgctgaattcaatgagcctgattcagaagtagccaatgctggtataaaacttgaaaattattttgaagaacttctaaagaacctctatccagaaaaaaggtttcccaaaccagaattcaggaatgaatcagaagataataaatttagtgatgattcagatgatgactttgtacagccccggaagaaacgcctcaaaagcattgaagaacgccagttgcttaaataatatgcagcaccactagcttgtgctggtttttagatttttttgttttcaaaaaaacatttgtcagtaatttaacatcactacaaaaagaagagtttgtgactattctcatctctgttttggacgtttactagactttgatttccttaatagcccatttctgttaacctcttatcactaagaaagaaaggaaagaaggagatgaatagaagaaagaaaatggaaagaaggaaaaaaggaggatagaaaaaggatggaagaaagaagcattgaaaacaaagacattcttcccacttcttggatttttaaaccacagtctggagtgatagctactgtagaaaggaaatagactttgtatgaactctttaagttgaaaagtaaaaaatatatgtggtttggatgtgtgctttaattcagctttagaaattaataccactacccgtgaattatatggcctgacaatatgaattaggtgtactgtactgaagaacagtactccacaaacatgggtggtaacaagagttccatcccaggaggccaaacggtgcaacagaagggtaggttagatgctattaagaaggcacttaatagtacatcatgtaagatggcaactgtattaaagaaaaatccggaaaacaaaaa

SEQ ID NO: 1072 - DNA, 5154 bp, Homo sapiens
tcgcgcaggcggggaccggtccagctgagcctggtggcggaaaggctgcggccccgcgccagagggccggtggctcctccgggcttctgaggacccgcagggagcgggcctcatcatttctgtctcctgtttctccacttccttctctattggttggtccactgatgtatggacttgcacatgatgaactgtgaacttctagccacatgtagtgcccttgggtacttggagggagacacttaccataaggaaccagattgcttagagagcgtgaaggatctgatccgctatttgaggcatgaggatgagacacgagatgtgcggcagcagctgggggcagcccagatcctacagagcgaccttctgcccatcctcacccagcaccaccaggacaagcctctctttgatgctgttatcagactgatggtgaacttgacacaaccagccttgctctgttttggcaatctgcctaaggagcccagctttcggcaccattttttgcaggtgctaacttatttgcaggcctacaaagaggcctttgccagtgagaaggcttttggagtcctcagtgaaaccttgtatgagctgctgcagctgggctgggaggaacggcaggaggaagacaacttgctgattgaacggatcctactgctggtcagaaatattctccatgtcccagctgaccttgatcaggagaagaagattgatgatgacgccagtgcccatgaccagctcctctgggcgattcacctcagcggcctggatgacctgctcctctttctggccagctcgtctgctgaggagcaatggagcctacatgtgctagagattgtctcccttatgtttcgtgaccagaaccccgagcagctggcgggagtagggcagggacgcttagctcaggagcggagtgcagattttgcagaactggaggtgttgcgccagcgagagatggcagaaaagaagactcgagccctccagcgaggcaacaggcattctcgatttgggggctcctatattgtccaggggttgaaatccattggggagagggacctcatctttcacaaaggccttcacaacctacgaaactacagttcagatttgggaaagcagccgaaaaaggtgcctaaacgtcgccaggccgcccgagagctgtccattcagcgccgttctgccctcaatgtgaggctcttcctcagagacttctgctctgagttcctggagaactgttacaaccggctcatgggatcagtaaaggatcacctgcttcgggagaaagctcagcagcatgatgagacctattatatgtgggccttggctttcttcatggccttcaaccgagctgcctccttccggccaggcctggtttctgagaccctcagtgtccgtaccttccacttcattgagcagaacctcaccaactactatgagatgatgctgactgaccgcaaggaagctgcctcctgggcacgccggatgcacttggctctgaaggcctatcaggagctgctggcaacagtgaatgagatggacatatctccagatgaggctgtgagggagagcagccgcatcatcaagaacaatattttctatgtgatggagtaccgagaactattcctggcactttttcgaaagtttgatgagagatgccagccccgctctttccttcgtgacctggtggagaccacccacctcttcctcaaaatgttggagcgattctgtcggagccgtgggaacctggtggtgcagaacaaacaaaagaagagaaggaagaagaagaagaaggtcctagaccaggccattgtttctggtaatgtcccatctagcccagaagaagtggaggctgtgtggccagccctggctgagcagctacagtgctgtgcccagaattctgagctcagcatggactccgtggttccctttgatgcggcctcagaggtgccagtggaggagcagcgggcagaagctatggtacggatccaagactgtctcctggctggccaggccccacaggccctgactctcctgaggtctgctcgggaggtgtggcctgaaggagatgtgtttggctctcaagacatttctccagaggaagagatccagttgctgaaacaaatcctctctgctccacttccccggcagcagggcccagaggaacgtggggcagaggaagaagaagaggaggaggaggaggaagaggaggagttgcaagtggtccaggtgtcggagaaagaatttaattttctggactacctgaaacgctttgcatgttcaactgtcgttcgagcctatgtgctgctactaaggagctaccagcagaatagtgcccacactaaccattgcattgtgaagatgctgcaccggctggcccatgacctcaaaatggaagccctactttttcagctgtcagtcttctgcctcttcaatcgtctgcttagtgaccctgctgctggagcctacaaagagctagtgacttttgccaaatacatcctgggcaaattttttgcactggctgcagtcaaccaaaaagcctttgtggagctgttgttctggaagaacacagctgtggttcgagagatgactgagggctatggctccctggatgacaggtcttccagtcgcagagcacctacatggagccccgaagaagaggctcatcttcgggagctgtacctcgccaataaggacgtggaagggcaggatgtggtggaagccatcttggcccacctgaatactgttcctcgaacacgcaagcagatcatccaccatctggtacagatgggactggctgacagtgtcaaggacttccaaaggaaaggaacccatattgtactgtggacgggggatcaggagttggagctgcagcggctttttgaggaattccgggactcagatgatgtcctgggtcatatcatgaagaatatcacagccaaacgctcacgggcccgaatagtggataaactcttggctctggggctggtggctgagcggcgggagctgtacaagaaacggcagaaaaagttggcatcctccatcttgccaaatggagcggagtccctgaaagatttttgccaggaagatctggaagaagaggaaaacctgcctgaggaagacagcgaagaggaagaagaagggggctcagaagcagaacaagtccagggtagcttagtcctttcaaatgaaaaccttggtcaaagcctgcatcaggaaggcttttctatcccgctcctatggctccagaactgcctgatccgagcagctgatgatcgggaagaggatggctgctcccaggccgttccattggtgccactcacagaggaaaatgaggaagccatggaaaacgaacagtttcagcagctgttgcgcaagctaggggttcggccccctgcctctgggcaggaaaccttctggcgaattccagccaagctgagtcctacccagctccggagggcagcagcttctttgagtcaaccagaggaggaacagaagctgcagccagagctgcagcctaaagtccctggagagcaaggctctgatgaggagcactgtaaagagcaccgagcacaagccctgagggccctcttgctagcccacaagaagaaagcgggcctggcatccccagaggaggaagacgctgttggtaaagagccgctgaaggcagcacccaagaaacgacaattgctggacagcgacgaggaacaggaagaagatgagggcaggaacagagcaccagagttgggagctccaggaatccaaaagaagaaacgataccagattgaggatgatgaggatgactgaagagctaagaagcctaggggtagagatagacacgtttttagatggtgcattcaagtcagagttggaagggtcatacaggacccagaagctcctcttactggacagagcagtagaatcccaggctctttcacggatttaggctgagaaacttcagcagcagtattggacttctctgctgtcagtctttgtttctcccagtttttatcggtatgccccagcagctctctggagatttagttctcttcttctaggaaccatttcttttggttattggagctccttagcaaataagaggagtgagtgaaatagagaaagcaccccggaccccttttattggtctgttcctttggctttctcttggaggtgggtcgcagcaccagatggggagctttatgacatgacaggcgggagttttgtaccacttttagaagataccagatgcctctgtcctcattttgtttcctatgatcatcctctagataccagatagaggcccattcctgcatttgagatagggttggaatatagtactctagatgatgaatgtgtttgctttgtgtttggtattaaacatgtaagattagaagttctcatctcagtctgacttggcgatatgtctaagttccccagcccttcccctgctgtgctcttgaaagaagaacttaacaattttagggtaaaaagagaccaacagaccggcacagtggctcaaacctgttgtcctagcactttgggaggctgaggcgggcggatcacctgaggtcaggagtttgagaccggcctggacaatatggcgaaatcccatctccactaaaaatacaaaaattagccggccatggtggcatgcgcctgtaatcccagccactcgggtggctgaggcaggagaattgcctgaacccaggaggcagaggttgcagtgagctaaggtcacgccagtgcatatgcctgggcgacagagcaagactctgtctcaaaaaaaaagaaaaaaaaaaaagaccaacaaccttcccttttcttccgctttccctacagaagacacagaaaagcatttttgcctctagatccttttgtctagggtaaattcttagggtgacaagagtatgcggcaggaagaaggaggagccataaaggaagagaagccagcttgttggcatggggcatagaaaaggacaaaatctaggcatgaaaaggatggataaatactgcaaatattatgttcttacccattcttggaaacgtcagctttcttgcttcctgtgcttccagccgaggtagggcaaaggtgagattgagaaaatagccattcagctcaggaaggcttctaagtaaaggatggatttggaaaaaaaaaaaaaaaaa

SEQ ID NO: 1073 - DNA, 5956 bp, Homo sapiens
gtgaactctgaccttagctttccgtagcgcccgcgtctgccgcccccgcccccggagcgaaggaggcgggctttggccttttgccctagggagcgagtgcggagcgagtgggagcgagacggccctgagtggaagtgtctggctccccgtagaggcccttctgtacgccccgccgcccatgagctcgttctcacgcgaacagcgccgtcgttaggctggctctgtagcctcggcttaccccgggacaggcccacgcctcgccagggagggggcagcccgtcgaggcgcctccctagtcagcgtcggcgtcgcgctgcgaccctggaagcgggagccgccgcgagcgagaggaggagctccagtggcggcggcggcggcggcagcggcagcgggcagcagctccagcagcgccagcaggcgggatcgaggccgtcaacatggcgagcgcctcgtaccacatttccaatttgctggaaaaaatgacatccagcgacaaggactttaggtttatggctacaaatgatttgatgacggaactgcagaaagattccatcaagttggatgatgatagtgaaaggaaagtagtgaaaatgattttgaagttattggaagataaaaatggagaggtacagaatttagctgtcaaatgtcttggtcctttagtgagtaaagtgaaagaataccaagtagagacaattgtagataccctctgcactaacatgctttctgataaagaacaacttcgagacatttcaagtattggtcttaaaacagtaattggagaacttcctccagcttccagtggctctgcattagctgctaatgtatgtaaaaagattactggacgtcttacaagtgcaatagcaaaacaggaagatgtctctgttcagctagaagccttggatattatggctgatatgttgagcaggcaaggaggacttcttgttaatttccatccttcaattctgacctgtctacttccccagttgaccagccctagacttgcagtgaggaaaagaaccattatcgctcttggccatctggttatgagctgtggaaatatagtttttgtagatcttattgaacatctgttgtcagagttgtccaaaaatgattctatgtcaacaacaagaacctacatacaatgtattgctgctattagtaggcaagctggtcatagaataggtgaataccttgagaagataattcctttggtggtaaaattttgcaatgtagatgatgatgaattaagagagtactgtattcaagcctttgaatcatttgtaagaagatgtcctaaggaagtatatcctcatgtttctaccattataaatatttgtcttaaatatcttacctatgatccaaattataattacgatgatgaagatgaagatgaaaatgcaatggatgctgatggtggtgatgatgatgatcaagggagtgatgatgaatacagtgatgatgatgacatgagttggaaagtgagacgtgcagctgcgaagtgcttggatgctgtagttagcacaaggcatgaaatgcttccagaattctacaagaccgtctctcctgcactaatatccagatttaaagagcgtgaagagaatgtaaaggcagatgtttttcacgcatacctttctcttttgaagcaaactcgtcctgtacaaagttggctatgtgaccctgatgcaatggagcagggagaaacacctttaacaatgcttcagagtcaggttcccaacattgttaaagctcttcacaaacagatgaaagaaaaaagtgtgaagacccgacagtgttgttttaacatgttaactgagctggtaaatgtattacctggggccctaactcaacacattcctgtacttgtaccaggaatcattttctcactgaatgataaatcaagctcatcgaatttgaagatcgatgctttgtcatgtctatacgtaatcctctgtaaccattctcctcaagtcttccatcctcacgttcaggctttggttcctccagtggtggcttgtgttggagacccattttacaaaattacatctgaagcacttcttgttactcaacagcttgtcaaagtaattcgtcctttagatcagccttcctcgtttgatgcaactccttatatcaaagatctatttacctgtaccattaagagattaaaagcagctgacattgatcaggaagtcaaggaaagggctatttcctgtatgggacaaattatttgcaaccttggagacaatttgggttctgacttgcctaatacacttcagattttcttggagagactaaagaatgaaattaccaggttaactacagtaaaggcattgacactgattgctgggtcacctttgaagatagatttgaggcctgttctgggagaaggggttcctatccttgcttcatttcttagaaaaaaccagagagctttgaaactgggtactctttctgcccttgatattctaataaaaaactatagtgacagcttgacagctgccatgattgatgcagttctagatgagctcccacctcttatcagcgaaagtgatatgcatgtttcacaaatggccatcagttttcttaccactttggcaaaagtatatccctcctccctttcaaagataagtggatccattctcaatgaacttattggacttgtgagatcacccttattgcaggggggagctcttagtgccatgctagactttttccaagctctggttgtcactggaacaaataatttaggatacatggatttgttgcgcatgctgactggtccagtttactctcagagcacagctcttactcataagcagtcttattattccattgccaaatgtgtagctgcccttactcgagcatgccctaaagagggaccagctgtagtaggtcagtttattcaagatgtcaagaactcaaggtctacagattccattcgtctcttagctctactttctcttggagaagttgggcatcatattgacttaagtggacagttggaactaaaatctgtaatactagaagctttctcatctcctagtgaagaagtcaaatcagctgcatcctatgcattaggcagcattagtgtgggcaaccttcctgaatatctgccgtttgtcctgcaagaaataactagtcaacccaaaaggcagtatcttttacttcattccttgaaggaaattattagctctgcatcagtggtgggccttaaaccatatgttgaaaacatctgggccttattactaaagcactgtgagtgtgcagaggaaggaaccagaaatgttgttgctgaatgtctaggaaaactcactctaattgatccagaaactctccttccacggcttaaggggtacttgatatcaggctcatcatatgcccgaagctcagtggttacggctgtgaaatttacaatttctgaccatccacaacctattgatccactgttaaagaactgcataggtgatttcctaaaaactttggaagacccagatttgaatgtgagaagagtagccttggtcacatttaattcagcagcacataacaagccatcattaataagggatctattggatactgttcttccacatctttacaatgaaacaaaagttagaaaggagcttataagagaggtagaaatgggtccatttaaacatacggttgatgatggtctggatattagaaaggcagcatttgagtgtatgtacacacttctagacagttgtcttgatagacttgatatctttgaatttctaaatcatgttgaagatggtttgaaggaccattatgatattaagatgctgacatttttaatgttggtgagactgtctaccctttgtccaagtgcagtactgcagaggttggaccgacttgttgagccattacgtgcaacatgtacaactaaggtaaaggcaaactcagtaaagcaggagtttgaaaaacaagatgaattaaagcgatctgccatgagagcagtagcagcactgctaaccattccagaagcagagaagagtccactgatgagtgaattccagtcacagatcagttctaaccctgagctggcggctatctttgaaagtatccagaaagattcatcatctactaacttggaatcaatggacactagttagatgtttgttcaccatggggaccattacatatgaccatacaatgcactgaattgacaggttaatcataagacatggaaagagaagtgtctaaaagcttcaaaatgttccacttttttttccttcatggagactgtttgtttggctttcttccattgttgtttttgtagcatttatttcagaaatgtgtatttccataatccagaggttgtaaaaccactagtgttttagtggttacagcaacatttgaaatggaaactaaaagttaggattttatggagtatggagatagggtccagtatctatttaccctgtaatgtttaggattaaaatgttaaaattttgtgaccatgaatttctttcttttataaattttctcatttaaaaatcaaaaatcttgcaaaacaaaaaccatgtttctttttcttgtataactttttgttttcagcaacataaattgatttttagctggcagacaagaatatccatataagatttgttaaccatttcagagagtttggcaatttttaaaagataataaggtatcatttttaagtatgaaaattaacaatatccctgttgcgcacactaattttgcatgagtaagtttacaaatatgtatcgtctgtaaagcagcatgtgcagattattcataatatagaagttaaaataagtattagtgcaattttcagatatttatttttgcacagaaaacacattatctggagagaaagaaaggagaatttttgagacttgggttttcttaatgccagtgtgaatttgcagatgttttcagaaaatcaagtcacagtaacaatttgccacttttttctattataaatcttcttacttaaattttgaatatttagtttttctcagttacccatttgtgtgtgtgtgattccacttagaaattcttaaaaccagatttttctttcattccgtttggatgtctacattccttatcaaaggatataaatactgtgtatgcttttgaattttatttttaggaaaattctgaagccagctatcacaggtttgttagctaataatagtattttcttttagttgagttaggtttttccccatctcctgtagagcgaatttacatattgtattgggtaagtgttcactacttttcctgattaagggatctgtgctggggaacaaagcttttgcagtaccttatattgtagttaaaattttatttaacatatccttcagtgagctcatttcacactgtagcctcttccttaaaatttgtggtgctcctgtaacagtaagaactaattctgaaataaaagacatctcctaatgctgtgcaaacatagtttacatgtattgaaggaggcagttgttaaattgagtgaccaatttaagcaatcagatatttgaaaactgcaccctttagttttgaaactgtgaattagaaacacttttcctgctgtattactacctgctttaacatccaaatatacagtgattttaaatgataacatactgtggttattagattaacagcttgattttgaatgttcagatgataatgcagaagacatcacttctagtaaggattttgactagtgcattgatgttgaagttggtgccatttcaaaatgtggcaggtgataatcttttaccataatttgcataaaactgtaatagaagtttattttgagatgttagtatattatgtactatgcatttctgtggtatagatgttgtggatatatttaagtatttggttacatggttttacaataaattacaatactgcaggcaaaaaaaaaaaaaaaaaaaaaaaaaaagaaaaaaaaaaaaaaaaaaag

SEQ ID NO: 1074 - DNA, 2352 bp, Homo sapiens
gaaacttaaaggtgtttaccttgtcatcagcatgtaagctaattatctcgggcaagatgtaggcttctattgtcttgttgctttagcgcttacgccccgcctctggtggctgcctaaaacctggcgccgggctaaaacaaacgcgaggcagcccccgagcctccactcaagccaattaaggaggactcggtccactccgttacgtgtacatccaacaagatcggcgttaaggtaacaccagaatatttggcaaagggagaaaaaaaaagcagcgaggcttcgccttccccctctcccttttttttcctcctcttccttcctcctccagccgccgccgaatcatgtcgatgagtccaaagcacacgactccgttctcagtgtctgacatcttgagtcccctggaggaaagctacaagaaagtgggcatggagggcggcggcctcggggctccgctggcggcgtacaggcagggccaggcggcaccgccaacagcggccatgcagcagcacgccgtggggcaccacggcgccgtcaccgccgcctaccacatgacggcggcgggggtgccccagctctcgcactccgccgtggggggctactgcaacggcaacctgggcaacatgagcgagctgccgccgtaccaggacaccatgaggaacagcgcctctggccccggatggtacggcgccaacccagacccgcgcttccccgccatctcccgcttcatgggcccggcgagcggcatgaacatgagcggcatgggcggcctgggctcgctgggggacgtgagcaagaacatggccccgctgccaagcgcgccgcgcaggaagcgccgggtgctcttctcgcaggcgcaggtgtacgagctggagcgacgcttcaagcaacagaagtacctgtcggcgccggagcgcgagcacctggccagcatgatccacctgacgcccacgcaggtcaagatctggttccagaaccaccgctacaaaatgaagcgccaggccaaggacaaggcggcgcagcagcaactgcagcaggacagcggcggcggcgggggcggcgggggcaccgggtgcccgcagcagcaacaggctcagcagcagtcgccgcgacgcgtggcggtgccggtcctggtgaaagacggcaaaccgtgccaggcgggtgcccccgcgccgggcgccgccagcctacaaggccacgcgcagcagcaggcgcagcaccaggcgcaggccgcgcaggcggcggcagcggccatctccgtgggcagcggtggcgccggccttggcgcacacccgggccaccagccaggcagcgcaggccagtctccggacctggcgcaccacgccgccagccccgcggcgctgcagggccaggtatccagcctgtcccacctgaactcctcgggctcggactacggcaccatgtcctgctccaccttgctatacggtcggacctggtgagaggacgccgggccggccctagcccagcgctctgcctcaccgcttccctcctgcccgccacacagaccaccatccaccgctgctccacgcgcttcgacttttcttaacaacctggccgcgtttagaccaaggaacaaaaaaaccacaaaggccaaactgctggacgtctttctttttttccccccctaaaatttgtgggtttttttttttaaaaaaagaaaatgaaaaacaaccaagcgcatccaatctcaaggaatctttaagcagagaagggcataaaacagctttggggtgtctttttttggtgattcaaatgggttttccacgctagggcggggcacagattggagagggctctgtgctgacatggctctggactctaaagaccaaacttcactctgggcacactctgccagcaaagaggactcgcttgtaaataccaggatttttttttttttttgaagggaggacgggagctggggagaggaaagagtcttcaacataacccacttgtcactgacacaaaggaagtgccccctccccggcaccctctggccgcctaggctcagcggcgaccgccctccgcgaaaatagtttgtttaatgtgaacttgtagctgtaaaacgctgtcaaaagttggactaaatgcctagtttttagtaatctgtacattttgttgtaaaaagaaaaaccactcccagtccccagcccttcacattttttatgggcattgacaaatctgtgtatattatttggcagtttggtatttgcggcgtcagtctttttctgttgtaacttatgtagatatttggcttaaatatagttcctaagaagcttctaataaattatacaaattaaaaagattctttttctgattaaaaaaaaaaaaaaaaaa

SEQ ID NO: 1075 - DNA, 6297 bp, Homo sapiens
cctgcgccggccgcccgcccggccgcggggagggaggcccgcagcgcgggaagagcggcccggtcgcgggcgccgccaccgccgccgctgccaggactgaaatgcaactgcagaagcaacatgtgaccttttagagatgcttgtgggactgcataaagtgaagagggaaactggaaaaaaacaatgaagtaaggaaaaaattgaatagggaaaacctgctttctgcaaacaactgaaaaagctgcatttagaaactgtttctttggccctcatcgagaagctggaacttgtattgttaggccccttatgggacaagctctcaactgctgatcacccagtgattgtcaccatggccagcaagaggaaatccaccacaccatgcatgatcccagtgaagactgtggtgttgcaagatgccagcatggaggcccagcccgctgagaccttgcctgaaggaccccagcaggatctgcccccagaagcatctgctgccagcagtgaggcagcacagaaccccagcagtactgatggctctacactggccaatgggcatcggagcactttagatggctatttatattcctgtaaatactgcgatttcagatcccatgacatgacccaatttgtgggacatatgaactcagagcacacagactttaataaagacccaacctttgtatgcagtgggtgcagttttctggcaaaaacccctgaggggctttccttgcacaatgccacatgtcactccggggaagccagctttgtgtggaacgtggccaagccagacaatcatgtggttgtggagcagagcatccctgagagcaccagcactcctgacctagcgggtgagcccagtgctgaaggggctgatggacaggcagaaatcatcattaccaaaactccaatcatgaagataatgaaaggcaaagctgaagccaaaaaaattcatacactcaaggagaatgtccctagccagcctgtgggtgaggccttaccaaagctgtcgactggagaaatggaggtgagagagggggaccattccttcatcaatggggcagttccagtcagccaggcatctgccagctctgcaaaaaacccccatgccgccaacgggcccctgataggaacagtgccagttttgccagctggcatagcacagttcctctccctccagcagcagcccccagtgcatgcccaacaccatgtccaccagccactgcccacggccaaggcccttcccaaagtgatgatccccctgagcagcattccaacgtacaatgcagccatggactctaacagcttcctgaagaactccttccacaagttcccctaccccaccaaagccgagctctgctatttgactgtggtgaccaagtatccagaagaacagctcaagatctggttcacagcccaaaggctgaagcaggggatcagctggtcccctgaggagattgaggatgcccggaaaaagatgttcaatacagtcatccagtctgtgcctcagcccacaattacggttctaaataccccactcgtcgccagtgctggcaatgtccagcatctcatccaggccgctcttccaggtcacgttgtggggcagccagagggtacaggagggggacttctggtcactcagccattgatggccaatgggttgcaagcaacaagttcccctctccccctcacggtgacatccgtccccaagcagccaggtgtggcacccattaacactgtgtgttcaaatacaacgtcagctgtgaaggtggtcaatgcggcccagtcgctcctcacggcctgccccagcataacctcccaagccttccttgatgctagcatctacaaaaataagaaatctcatgaacagctgtcagctctgaaagggagcttctgtcggaaccagttcccagggcagagcgaagttgaacatctcacaaaagtgacgggcctcagtaccagagaggtgcggaaatggttcagtgatcgtagataccactgccggaacttgaagggctccagagcgatgatacctggagatcacagttccatcatcattgactctgtgccagaggtgtccttctccccatcgtccaaggtccctgaggtaacctgcattccgacaacagccacactagcaacccacccttctgccaaacgacaatcttggcaccagactcctgacttcacaccaaccaaatacaaggagagagcccctgagcagctcagagccctggagagcagttttgcacaaaaccctcttcctcttgatgaggaactggaccgcctgagaagtgaaaccaaaatgacccgacgagaaattgatagctggttttcagagagacggaaaaaagtgaatgctgaggagaccaagaaggctgaggagaatgcctctcaggaggaagaggaggctgctgaggatgagggtggagaagaggatttggccagtgagctaagggtctctggtgaaaatggctctctggaaatgcccagcagccatatcttggcagagcgcaaagtcagccccattaaaatcaacctgaagaacctgagggtcactgaagccaatggcaggaacgagattccagggctgggtgcctgtgaccctgaggatgatgagtcaaacaaactggcagagcagctcccaggcaaagtgagctgcaaaaagactgcccagcagcggcacttgctgcggcagctctttgtccagacacagtggccaagcaaccaggactatgactccatcatggcccagacgggtctgccacggccagaggtggtgcgctggtttggagatagcaggtacgcactgaagaacggccaactcaaatggtacgaagactataagcgaggcaacttcccaccagggctactggtcattgcccctggcaaccgggagctcctgcaggactattacatgacacacaagatgctgtatgaagaggacctgcagaacctctgtgacaagacccagatgagctcccagcaggtcaagcagtggtttgctgagaaaatgggggaggagaccagagccgtggcagacacaggcagtgaggaccagggccctggtactactgagctcacagcagttcacaaagggatgggtgacacctattcagaggtgtctgagaacagtgagtcgtgggagccccgtgtccctgaggccagctcagagccctttgacacatcgagtccccaggctggacgtcagctcgaaacagactgaatttgatctgattaatgtgaaggactggccagtctgggaaaccgcctgccacgtggaagagccaaacccgactctctgctgccacatgccgttcccatgcccggctgctgggcacctgggagagcttccagaatcctcgcagacagcccagagcctgccgctaccctcggcctgcccaccaccaagcaagcagcaagcaagatggggttctcatcagttcttcctcccacaatgtaggacctttcctttaccttccaatggataaaatagttcagagttcatagtcatattcatagacacagaatcaagcttttaacatatacatccacctctatatgttaaataaaacatcagattatcaacactgtcattacgtagaaactttggttagccaagcagtgcattgtcagttacgtcatctctaaaaatgacctgtgtctgttctctggggattgctgggtcacaggtgcccctcaccttccacagtcaggcagggaagttataggcacaaagctacgtctggaacccctttgtgccccctttgtgttcctcaaggaagcagtacctttgaagagatctctgctgcattaagtgatgaccggctacgtttcatgtcaggcttgctttgccttgtgggctactcagtgcagaacctgctgtaaccctcagttcaaaaaatggactggcaatgtgattagcgttggatgctttaccattctctttagttgttaccgtaattctgctttttcatgggagtttgaatcatggaccataacttttcagttatcagatcaactaaagaaacatttgttgttaagcctaatgtgctgacctatgtgcctgcatttttttttttaatctagacatgtttggagtgagagaaagatggaaaaaagacatggggtagggacgtaagtggaaatctatagccacagcctgaagctttgaccactgcggttttcagagccctttctccacactcatttcagagcctcctatggtttgggaaggaataacacactggcccattagtaagggtgaaggctggagggatttgttgacttcttggaattatcagaggtagggtggtctttagcacaaagacttgcatgcagagatccctggcagaacacccagagtgcccgtggctcccaccccagggtctggccggtgtgctggatgcatgcccaagggtgctgggcatcactggtccttgtgaggatgcttttaaagttttatatttatgtccccaaacttggaaacaagaactctactttagcctaaccctcatgtccttttttgaattgagaaaattacaggaaatggtgcctttgaaaattagaaaacttgcttacagagctgttctaaatggtaaatcctcaatttccccaagaccggttgctctgagagtagctggtaaagaggggcgaactaaagacctgtccacctgtagctccgctcatttcttagaaaccacctgcttcccagagtgccaagccacaagtaccaggcttcgtgggcacagacacctcctgggctgggcagagtgacagtgctagaagaccccagagagagggcaagggctttgggcaagaagcactggtggtgttttagggaccgtccttctcccctacccagggaactggacctggcagggcaccgtgctcatgtggctccaaggacaagcatggcggtggccccttctgccttccaggagaggtcttgcttttgaaaccaaaatcatgttcttctaaagtgtcatcttctgccctccctgtcccaatagggaccacatcttatttgtctcaaacagggacttgtgagtacttggcaagttttgcagcctatttttgtattcttaatttggggagtaaagatgtttggtctcaaaaacctttgaggaattgccaagaatggcgagtgattgctttccttcagagaacagacacttggaatttctccttttagtgtttatatacgtgcagattaatttatatatatatatatacacacacacatatacagtataaatactcatttgattctcgtaaaacgcgcatctggcgtgtgcagttgagaaacttggtggcacatgggtgttgggggagtagcctgtgttggagggacaccagtgcactaggcagctggggcggcccaggctgaagccatctccgggtgtctgagaaaccacccagtgcctcacctccagatcctgctggcatcacctccagagccctgcatgcactggctgaagagttggtctgtggagaggattttcttggttacttgtattcacggttaatttacaacccaaacagcaaaacacagttggtggacaagttcatgcaggacctacagtgacccagccatgggcactagctcatctttcaggtggaaaagtacagtgctgcctgccctggtatgtttttcttatagatgttagccctgcccaacagccagggctacactacaaaaggcaagaatgcccatgtaaggagcccagcagtctggacagatccttcttcctctgctgttggatgagagtgagtgagtatggtctggaccttatccttgaaagatgatcaaaagcgatgatgagggaggcagtcatcacgcaggtgcttaaagggacattgtaggaggtactcaagggtttgggggcaaaaccctgaatccagccagtcgtgcacagagacacacccacactagcccagtggcagtgggggatgtgggatggcagcagccaggtatgtagccctgtcacaggacagctcactgtggttttgcacactgcctaagggttaaattgtgttgttgccttcagtagaaggcatttgtgggctgcagagttgagagttgggtgaggttagtctctcctgaagaaaaagcctataaaaagtggctaatcttatcccttttctctgtatgcagttggactcgtcagagatagtaaaatcatcttttagtgtttttttgttgctgatgtcttgtacccatttgttttttacatggggttgtagatcgagttctcaaaggtgaaaccagatgatcattctgataaaggaaatttaaatttg

SEQ ID NO: 1076 - DNA, 2209 bp, Homo sapiens
agcagacaagatggcttccgggatttggcggcgcctttgtctctcgctgcagccggagctccaggtctcgctttcattgctctgtgtcctctgctcctagaggtccagcctctgtgggcctgtgacctgcagaaattgagagatccacagctaagactccaggaccccctggaagcctagaaatgggactgttgacatttagggatgtggccatagaattctctctggaagaatggcaatgcctggacactgcacagcggaatttatataaaaatgtgattttagagaactacagaaacctggtcttcctgggtattgctgtctctaagcaagacctgatcacctgtctggagcaagaaaaagagcctttgactgtgaagagacatgagatggtgaatgaacccccagtaatgtgttctcattttgcccaagagttttggccagagcagaacataaaagattcttttgaaaaagtgacactgagaagatatgaaaaatgtggaaatgataattttcagttaaaaggctgtaaaagtgtggatgaatgtaagttgcacaagggaggttataatggacttaaccaatgtttaccaactatgcagagcaaaatgtttcaatgtgataaatatgtgaaagtctttaataaattttcacattcagatagacataagataaaacatatggaaaataaacctttcaaatgtaaagaatgtggcagatcattttgcatgctttcacacctaactcgacatgaaagaaattataccaaggtgaatttctgcaaatgtgaagaatgtgaaaaagctgttaaccaatcttcaaagcttactaaacataaaagaatttatacttgtgagaaactctacaaatgtcaagaatgtgacagaacttttaaccaattctcaaaccttactgaatataaaaaagattatgctcgagagaaaccatacaaatgtgaagaatgtggcaaagcctttaaccagtcctcacaccttactacacataagataattcatacaggagagaaaccctacaaatgtgaagaatgtggcaaagcctttaaccagttctcaaatcttactacacataaaaaaattcatactggagagcaaccctacatatgtgaagaatgtggcaaggcttttacccaatcctcaacccttactacacataagagaattcatactggagaaaaaccctacaaatgtgaagaatgtggaaaagcttttaaccgatcctcaaaacttactgaacataaaaacattcatactggagagcaaccctacaaatgtgaggaatgcggcaaagcttttaaccgatcctcaaatcttacggaacataggaaaattcataccgaagagaaaccctacaaatgtaaagaatgtggcaaagcttttaaacactcctcagcccttactacacataagagaattcacactggagagaaaccctacaaatgtgaagaatgtggcaaagcttttaaccgatcctcaaaacttactgaacataagaaacttcatactggaaagaaaccctacaaatgtgaagaatgtggcaaagcttttatccaatcctcaaaacttactgaacataagaaaattcattctggagagataccctacaagtgtgaagaatgtggcaaagcttttaaacactcctcatcccttactacacataaaagaattcatactggggagaaaccctacaaatgtgaagaatgtggcaaagcttttagccgatcctcaaaacttactgaacataagataattcatactggagagaaaccctataaatgtgagagatgtgacaaagcttttaaccaatctgcaaaccttactaaacataaaaaaatacatactggagagaaactacagaactggaatgtgtgataatgattttgacaacacctcaaatttttctaaatataaaggaaatcatactggtgaaaaattctagaaatgtaaagaatgtgtcaaagactttaaatggttttcacacttcattgtatgtaagataattcatactggagaaaactacaagtgtgaagaatttggcaatactgttaattaaggctcaaaccttattgcacaggaaagcgtttatacttaagaaaaattgtacaaatataaagagtgtaaaatagccattaatatctgttgacatcttaatatcagaatgttggtacttaataaaagcattataaatgcaa

SEQ ID NO: 1077 - DNA, 2123 bp, Homo sapiens
tcccagagtcaacagcgagcgagcagccggagcggggaagcagaagccagagaggggaagaatacggcgccccctctctccctcccctcccccttctactttagcctttctgcgcacttcgcttccaagtctccgcgcagccaggagccgctgttgcctcccagcccctgctagctgccccccgagccgagcgcagcgagcgccgccgcccgggccccccggtggggccagggccagcatggagcacctgggtccgcaccacctccacccgggtcacgcagagcccattagcttcggcatcgaccagatcctcaacagcccggaccagggtggctgcatgggacccgcctcgcgcctccaggacggagaatacggccttggctgcttggtcggaggcgcctacacttacggcggcgggggctccgcggccgcgacgggggctggaggagcgggggcctatggtactggaggtcccggcggccccggaggcccggcaggcggcggcggcgcctgcagcatgggtcctctgaccggctcctacaacgtgaacatggccttggcaggcggccccggtcctggcggcggcggcggcagcagcggcggtgccggggcactcagcgctgcgggggtaatccgggtgccggcacacaggccgctcgccggagccgtggcccacccccagcccctggccaccggcttgcccaccgtgccctctgtgcctgccatgccgggcgtcaacaacctcactggcctcaccttcccctggatggagagtaaccgcagatacacaaaggacaggttcacaggtcacccctatcagaaccggacgccccccaagaagaagaagccgcgcacgtccttcacacgcctgcagatctgcgagctggagaagcgcttccaccgccagaagtacctggcctcggccgagcgcgccgccctggccaaggcgctcaaaatgaccgatgcgcaggtcaaaacctggttccagaaccggcggacaaagtggagacggcagactgcggaggaacgggaggccgagaggcagcaagcgaaccgcatcctcctgcagttgcagcaggaggccttccagaagagcctggcacagccgctgcccgctgaccctctgtgcgtgcacaactcgtcgctcttcgccctgcagaatctgcagccgtggtctgacgactcgaccaaaatcactagcgtcacgtcggtggcgtcggcctgcgagtgagcctgcccattctgccctgtgggaccccaggcccactcaggggtcactgaggcctgagacccaggactcctccccaccctcctggcctcagactgcacccaggaggggaacactgccctcgcacggccccgaagggcccccacatttgtgccgacactgttctcccttcggtggaagagctcaagggacaaggacacgcgcccccctcccagaggcgtcccgcacctgtctgaactgttaagaaatctgtttttgtttatttcattttattttaatttttaacgtgggattcagagaaaggcaagggaggtaagggaggaggagcttctggggtccccagggctgtcatctgaatttgccctgggaaaccccttctctgtgacccacttctcatcacacacatggaaacccataggcccacacacaggtggtgtcactgtccctcctggtgtcaccccagagccacacatgggcatctatgggagagtgtcaaccagacagagggtcacagtgtttacactttggaccttacgatcaggcacaggtcaggggtgacacagactcatcctgaacagcatggcactccctccagcacaaacacaaggtcatggccacactgtgacacactacaccacacacaacagccaacagctacaacagcctcacttggtctgccaggcccccaccacacatcccagcccaatccaggtacgcacagacaggttttcacataaatgcagcccatttctccagaacccatttgaggggtgggggggtgttaatttatgcacttataaggtgttttctgtgtaaccattttataaagtgcttgtgtaatttatgtgaaaaaaataaataaaagcctccggatccggaaaaaaaaaaaaaaaaa

SEQ ID NO: 1078 - DNA, 1415 bp, Homo sapiens
atccaaccaaggcctcagtgaggtcccacgtgtcccccgtggcgagatttcgccctcccgccgttgaggaggaagagtgtgagaacagacttcctaggcaccgggcgccgttccccagccgcttcttacgcagccgggaaaccacaacgagatttggtcttcgagagcatttaggcggggaccacaacgaatccgggagttggccagaaggatccatcgagaggcgaagagtgggggctgggggaggaggcacctgcggaggaagccggtgaggcggaggcagcccaaaggcggaggccgcccaaaggcggaggccagcaaggatggaggcgcgctgcgctctcgcccttctctgggacgcgccgcataggccacccctaccaaaaccggacccctccgaagcggaagaagccgcgcacgtccttctcccgctcacaggtgctggagttggagcggcgcttcctgcgccagaagtacctggcctctgcggagagggcggcgctggccaaggccttgcgcatgaccgacgcacaggtcaaaacgtggttccagaaccgacgcaccaagtggcggcgccagacggcggaggagcgcgaggccgagcggcaccgcgcgggccggctgctcctgcatctgcagcaggacgcgttgccacggccgctgcggccgccgctgcccccggaccctctctgcctgcacaactcgtcgctcttcgcgctgcagaacctgcagccctgggccgaggacaacaaagtggcttcagtgtccgggctcgcctcggtggtgtgagcgacgcccgtccgatcggcgtggagcgccgggcccggagcggtggagcgcgcggctgcctgcgtccatggtctagtggcagccgggcgcgtgaggagcggcaggccttgaggctgtcgtcgagggctcctccaccaccggccggctcccaagccagcgttgcgcagatgcacggccagctcagaggcggcctttcccgccatttttcacttcactgccgttacgccctcgctggaacctgaggcgccgagagggcgggacctgcaggacagtagccaatgaggtgcggggagggggccgggctggccaatgggagctgctttcctgagggactcgaaattctccggcgggtggtcgggagctggggctctgaggggctctagcggcgttgcgcgcggtgccggctgggtctgtaccaaaggtgtgaaggaaagaagacaccgaccacggcgaagcaatagagggggtgctggagcgcgagaggctggctgattgtgaccgaaaccagagggttgtccaccccgggcatctcatccctcaactgtaaaataatcgctaaggattccttcctgactttgaaaaaaaaaaaaaaaaaaaaaaaaaaaaaaaaaaaaaaaaaaaaaaaa

SEQ ID NO: 1079 - DNA, 1513 bp, Homo sapiens
gccgggcgctccatggccgcgccgtaacggggacccagccgcctccccgcccagcccagcccagcccttccgcccgcccaggatggaggcgcccgccagcgcgcagaccccgcacccgcacgagcccatcagcttcggcatcgaccagatccttaacagcccggaccaggacagcgcacccgccccgcggggccccgacggcgccagctacctgggagggccccccgggggccgtccgggcgccacatacccgtctctgcccgcctcctttgcgggcctcggcgcgcccttcgaggacgcgggatcttacagtgtgaacctgagcctagcgcccgcaggcgtgatccgggtgccggcgcacaggccgctgcccggggccgtgccaccgcctctgccaagcgcgctacccgccatgccctccgtgcccacggtctccagccttggcggtctcaatttcccctggatggagagcagccgccgcttcgtgaaagaccgcttcacagcggcggccgcactcacgcccttcaccgtgacccggcgcatcggccacccctaccagaaccggacgccgcccaagcgtaagaagccgcgcacgtccttttcccgggtgcagatctgcgagctggaaaagcgcttccatcgccagaagtacctggcctctgccgagagggcggcgctcgccaagtccctcaaaatgacggacgcgcaggtcaagacctggttccaaaaccggaggaccaagtggcggcggcagacggcggaggagcgggaggcggagcggcagcaggcgagccggctcatgctgcagctgcaacacgacgccttccaaaagagcctcaacgactccatccagcctgacccgctctgtctgcacaactcgtcactctttgctctgcagaatctgcagccctgggaggaggatagttccaaggttcccgctgtcacctccctggtgtgagcccaccagcgcgcaccgtcgccacggatcgccgcccccacccagccgggcgccccggaccccccaggagggctgcgggggaaccggcgccgagaggggaaggggccgcctagcccgagtaggccccagggcgcggccacagactggcgggccgcggaagggggtagggcccgagctccgcgcggccgcacaatccgagcccccgccccgcgccccgtcccgccccaggcccgggcctgacaagaaagcgccttacgtttctccgccccccgcccgcaccccccgggccgggcgcctgtattatactttgtacttttgcccaaacgtgtaaataataaaaaagttttggcttttttctttagaaaccggccacctgcttcccccgcgggggccgctggaggaagggcagccgacccggccgctgggggaagtgccaggggcccggggcaccctgcgtttaggctgggtccactcttcttctttttcgttccttttatttaagtctttttatttaataaaaaagttagctatttcaaaaaaaaaaaaaaaaaaaaa

SEQ ID NO: 1080 - DNA, 6895 bp, Homo sapiens
gtagatttggttgctgtgtacgtggaagaagcaagcgcatgcgcacatgggcccccttcgtctcagctgtgcgggaacggccgagggtaacatcccgggctcgcgggaggctgtcggggtaatggccacacgctgacagaaccagccgagtggaaaaggggagcgaagccgttcctctgcacccttccccaggcctgaggccttcccgcttggtgctgccgccgccactgccggctgaggaggggcgatgagttggttcaacgcctcccagctctccagcttcgctaagcaggccctgtcccaggcccagaagtctattgacagggttctggacatccaggaagaggagccgagcatctgggccgagaccattccgtatggagagccgggaataagttcccctgtcagtggaggatgggatacttcaacctgggggttgaaatcaaacactgaacctcagagtccaccaatagcctctcctaaagcaatcacaaagccagttcggaggactgtggtcgatgaatctgaaaatttcttcagtgcctttctctcgccaactgatgtccagaccattcagaagagtccagtggtatcaaaacctccagcaaaatcacaacgaccagaagaagaagtgaaaagcagcttacatgaatccttgcacattggccagtcaagaactcctgaaacaactgaatcacaagtaaaagactcttctttgtgtgtttcaggggaaactctggcagcaggtacttcatcacctaaaactgaaggcaagcacgaagaaactgttaataaagaatcggatatgaaggtgccaactgtaagtttgaaagtatctgaaagtgtaattgatgtgaaaacaactatggaaagtatatctaatacgtctacgcagtctctcacagcagaaacaaaggacatagctttggaacctaaggaacaaaaacatgaagacaggcagagcaatacaccttctcctcctgttagtaccttttcatcaggtacttctaccaccagtgatattgaagttttagatcatgaaagtgtaataagtgagagctcagcgagctcgagacaagagactacagattcaaaatcaagtcttcacttgatgcagacatcttttcagcttctctctgcatctgcttgtcctgaatataatcgtttagatgatttccaaaaactcactgagagttgctgttcatctgatgcttttgaaagaatagactcatttagtgtacagtcattagatagccggagtgtaagtgaaatcaattcagatgatgaattgtcaggcaagggatatgctttagtgcctattatagttaattcttcaactccaaagtctaaaacagttgaatctgctgaaggaaaatctgaagaagtaaatgaaacattagttatacccactgaggaagcagaaatggaagaaagtggacgaagtgcaactcctgttaactgtgaacagcctgatatcttggtttcttccacaccaataaatgaaggacagactgtgttagacaaggtggctgagcagtgtgaacctgctgaaagtcagccagaagcactttctgagaaggaagatgtttgcaagacagttgaatttctgaatgaaaagctggaaaaaagggaggctcagttattatctcttagtaaggaaaaagcacttctagaagaagcttttgataacctgaaagatgaaatgttcagagtgaaagaagaaagcagtagcatttcttccttgaaagatgagtttactcaaagaattgcagaagcagaaaagaaagttcaactagcctgcaaagagagagatgctgctaaaaaggaaatcaaaaacataaaagaagaacttgccactagattaaatagtagtgaaactgcagaccttttgaaagagaaagatgagcagatccgagggttaatggaagaaggagaaaaactttcaaaacagcagctgcacaattctaacatcatcaagaaattaagagctaaagacaaggagaatgaaaatatggttgcaaagctgaacaaaaaagttaaagagctagaagaggagttgcagcatttgaaacaggtccttgatggcaaagaagaggttgagaaacaacatagagaaaatattaaaaaactaaattccatggtagaacgccaagagaaagatcttggccgtcttcaggtagacatggatgaacttgaagaaaagaaccgaagtattcaggctgccctggatagtgcatacaaagaacttactgatcttcacaaagccaatgctgcaaaggatagtgaggcacaggaagctgctctgagccgtgaaatgaaagctaaagaagaactttctgcagcattagagaaggcccaagaagaagcccgtcagcagcaagaaacattagccattcaagtgggggaccttaggcttgcattgcagcgtacagaacaagcggctgccagaaaggaggattatttacgccatgagatcggtgaacttcagcagagactccaggaagcagagaatcgaaaccaggaactgagtcaaagtgtttcatcaacaacaagaccattgcttcgacaaatagaaaatttgcaagcaaccctgggatcccagacatcgtcgtgggagaaattagagaagaatctttctgataggcttggtgaatcccagaccttgctggcagcagcagttgagagagaacgtgcagctacagaagaactccttgctaacaaaattcagatgtcttccatggagtcacagaattctcttttaagacaggaaaacagtagatttcaagcccagctagaatcagagaaaaataggctgtgtaaactggaggatgagaacaataggtaccaggttgaattggaaaacctaaaagatgaatatgtaagaacacttgaagagacgaggaaagaaaagacattgttgaatagtcagttagaaatggaaagaatgaaagttgaacaagaaaggaagaaagccatttttactcaagaaacaataaaagaaaaggaacgcaagccattttctgtttctagcactcccaccatgtcacgctcaagttcaataagtggtgttgatatggcaggactacagacatcttttctgtctcaggatgagtctcatgatcactcatttggaccaatgcctatatcagcaaatggaagcaatctttatgatgctgtaaggatgggagcaggatcaagcataattgaaaacctacagtctcagctaaagctaagggaaggggaaatcactcatttacagctagaaattggcaatctagaaaaaactcgatcaataatggctgaagaactagttaaattaacaaatcaaaatgatgaacttgaagagaaggtgaaggagatacccaaacttagaactcagctaagagatttggatcaaaggtacaacactattctgcagatgtatggagaaaaagcagaagaggcagaagaacttcgattagatctcgaagatgtaaaaaatatgtacaaaactcaaatagatgaacttttaagacaaagtctcagttaacttgtgaaaattgaattcccatcaaactgaatgtaagcatttaatatctaaacatttaatgtggacttccaataaattcttttatagaattagaaagtgggatttactgtagagtgtaaaaatttttttaaaattgttttacactatgtagtaatatttacagttaaattattttgtgcaatatttgaactttatttttgaaactattctttaaagatttattttttaaagcattcattttttttccttgaatagcacagagatttattactttatcctcatataaatatggctagagaagaagaatggtgttcatatatgtattgtagatatacaactagttgtatctataatttgtaagtgtttatatatatattaagaacatttgaagagtaatgttaacatactgaaactttgaaatctttcacatttaaaatttcaacatatcttaattactgctcatgaaaatgtacattaagtgttaaagtaaaaaattattaaatctgtggctattaaattttaaactaatttttttcctttaaaagtaagagtcacactgacactgtctgaaatttaaagagtgaatgatttaaacttaaaaaaaattttgatctgaaaatttatttcacccagctttcacaattaagtctgtataaaatgtggtaccttttggtacctatccagagaaacctgtacatattcaatgttatctagatgtgattggataatggagaaaatttatttataatgattttgcaatggcatcaataacatttaaatgattttgaagaagtattattttactaccctataaaatgaatcgaaaataataaagttcttaacataatttactctttaaaaattacctgttcatattttgtaaacccatatttttagcacattaaaaatgaatgtttgatattacagaatattcataacaaaatggaagaattataggaattaacttgaatttggcatttttaattttgtgatttatcattttattttttcttgaaatttcaaacacaaggaaagcatagaatagcttttaaaagtagctatgccttcttccaaatgttattttattcaaaaaggtaaccaggttgtgttttaaacctgtgaaatattgtgatgcattttattactgaaagttatttaactgcctttacttgcacataaaaactctcatttacggccaggtgctgtggctcatgcctgtaatcccagcactttgggaggccaaggcgggcatatcacctgatgtcaggagttcaagaccagcatggccagcagtttggtgaaaccccatctctactaaaaatacaaaaattagcctggcgtggtggtgtgcgcctgtaatcctagctactcgggaggctgaggcaggagcattgcttgaacctgggaggtggaggttacaatgagccaagattgtgccactgcactccagcatgggtgacagagaaagactccgtctcaaaaaaaaaaaaacaaactcttatttaatttttagttaaaattaaaacactagtacttcagaatatagatacaagtacaccatcttgaagaatttggagtttttcagggcaattcaaatgacctcattttttgttctttttgtattccagacagtgtttctgtcattggatctctgattggtagtgttaataaatattctttcagtgtgagccagattcataaaattaattttcttcattttagtagtaaaaagtagtctaatagctttttgtcagcttgatttttttgtgtgtgtaatattcaagggcagaatgacaggacagataagcaataagaaatgtatagaattagaaaatatagtagttccctcttacccatgggacatacgttccaagacccccagtgaacgtctgaaaccatggatagtatagacacctctatacactgttttttcctatacatatatacctatgataaagttctatttataaatcagggacagcaagagataaacaataactgcaaatagaacaattataacagtgcactgtaataaaagtgatgtaaatgtgatatgtctgtctctttctctcaaaatatcttattgtactgtactcacctgtaatcagactgtggttgaccgtgagtaaccgaaaccacagaaagcaaaatcgtggataaggggagactactctatatgaaacttaagttacaaaattctctgaagcatttgaaactagacgttttggaattataaaatagtccctttaaaatatccactagtagaaaaaaacttcatttgcagagaaaagattgcaataaaactcattcctaaacttttcaattttataaaattaaacattctttttttatccgtattaacaatttctagttacatagtttctagttacatattaccatatattactctttatctacaaataaatagctgatactcaaactgatcatattttgattgttaaacacttggatctctcaatacttctgtaagttaaagtgaacttaaacagtttcttgaaaaactccagtaggtggcagaatacctattgaatattcgttgctatactttgctgtttgtcattaaaacatctctacccatattcttgcaaaataatatttatattttaatggataggaaaatgatttgcaattagatgtttccattcttgaaagaaaaaagctgcaaataacattttcaagaatataaaaaaatgagtaaacaaagggaaggttgtttggtcatttatagacaattaagcacagactgtagatgtccttccaattcttgggaggctaaactgagtctaccatttcttacatttcttttacctattttttgagaattgccagttgtacagtgtttagcatgtggaatgtaccaaatatatctatgttgtgacttaagatattctaaatgtggataacttctgacctaggaaacatgaagtttgtagtgaagtaagtgaaaagaatgttcaggaaattttttttctccatctcttcagttggcatttattgagagttttatttgaatgcttattaaaagtatatgatttataatatttagaaaatagaagaaaaaagaaaactgtagatgttttatcttgttttaatactgtatgtttagtacgtatacatttatgttctagtgtatcaaaatttttcattttcattaaagtgaatccaattttccatattctaggtccattttaaaccatgaaaactttaatcacatattttgtaaagggctgaaagtatgatttaaactacagattgatatattttaattctaaatgaaaggtaatgtaaataagcatggatctgattgaataaagattttaaaatagtaaaaaaaaaaaaaaaaaa

SEQ ID NO: 1081 - DNA, 6985 bp, Homo sapiens
attgtccgatggttcccggcgtacctcggcttccctcggtagtttccggcaatggtcgagagtttctaacgtgcccccttgttgtctctcggccgccgtcctctcaaccaccgccccccttttcggctccctctcccccttcccgttcccccagtcagcctggccctgctggtgcctccggcgctacgggctgggcaagatggcggccttcgggatcttgagctacgaacaccggcccctgaagcggccgcggctggggcctcccgatgtttaccctcaggaccccaaacagaaggaggatgaactgacggccttgaatgtaaaacaaggtttcaataaccagcctgctgtctctggggatgagcatggcagtgccaagaacgtcagcttcaatcctgccaagatcagttccaacttcagcagcattattgcagagaaattacgttgtaatacccttcctgacactggtcgcaggaagccccaagtgaaccagaaggataacttctggctggtgactgcacgatcccagagtgccattaacacttggttcactgacttggctggcaccaagccactcacgcaactagccaaaaaggtccccattttcagtaagaaggaagaggtgtttgggtacttagccaaatacacagtgcctgtgatgcgggctgcctggctcattaagatgacctgtgcctactatgcagcaatctctgagaccaaggttaagaagagacatgttgaccctttcatggaatggactcagatcatcaccaagtacttatgggagcagttacagaagatggctgaatactaccggccagggcctgcaggaagtgggggctgtggttccacgatagggcccttgccccatgatgtagaggtggcaatccggcagtgggattacaccgagaagctggccatgttcatgtttcaggatggaatgctggacagacatgagttcctgacctgggtgcttgagtgttttgagaagatccgccctggagaggatgaattgcttaaactgctgctgcctctgcttctccgatactctggggaatttgttcagtctgcatacctgtcccgccggcttgcctacttctgtacacggagactggccctgcagctggatggtgtgagcagtcactcatctcatgttatatctgctcagtcaacaagcacgctacccaccacccctgctcctcagcccccaactagcagcacaccctcgactccctttagtgacctgcttatgtgccctcagcaccggcccctggtttttggcctcagctgtatcctacagaccatcctcctgtgctgtcctagtgccttggtttggcactactcactgactgatagcagaattaagaccggctcaccacttgaccacttgcctattgccccgtccaacctgcccatgccagagggtaacagtgccttcactcagcaggtccgtgcaaagttgcgggagatcgagcagcagatcaaggagcggggacaggcagttgaagttcgctggtctttcgataaatgccaggaagctactgcaggcttcaccattggacgggtacttcatactttggaagtgctggacagccatagttttgaacgctctgacttcagcaactctcttgactccctttgtaaccgaatctttggattgggacctagcaaggatgggcatgagatctcctcagatgatgatgctgtggtgtcattgctatgtgaatgggctgtcagctgcaagcgttctggtcggcatcgtgctatggtggtagccaagctcctggagaagagacaggcggagattgaggctgagcgttgtggagaatcagaagccgcagatgagaagggttccatcgcctctggctccctttctgctcccagtgctcccattttccaggatgtcctcctgcagtttctggatacacaggctcccatgctgacggaccctcgaagtgagagtgagcgggtggaattctttaacttagtactgctgttctgtgaactgattcgacatgatgttttctcccacaacatgtatacttgcactctcatctcccgaggggaccttgcctttggagcccctggtccccggcctccctctccctttgatgatcctgccgatgacccagagcacaaggaggctgaaggcagcagcagcagcaagctggaagatccagggctctcagaatctatggacattgaccctagttccagtgttctctttgaggacatggagaagcctgatttctcattgttctcccctactatgccctgtgaggggaagggcagtccatcccctgagaagccagatgtcgagaaggaggtgaagcccccacccaaggagaagattgaagggacccttggggttctttacgaccagccacgacacgtgcagtacgccacccattttcccatcccccaggaggagtcatgcagccatgagtgcaaccagcggttggtcgtactgtttggggtgggaaagcagcgagatgatgcccgccatgccatcaagaaaatcaccaaggatatcttgaaggttctgaaccgcaaagggacagcagaaactgaccagcttgctcctattgtgcctctgaatcctggagacctgacattcttaggtggggaggatgggcagaagcggcgacgcaaccggcctgaagccttccccactgctgaagatatctttgctaagttccagcacctttcacattatgaccaacaccaggtcacggctcaggtctcccggaatgttctggagcagatcacgagctttgcccttggcatgtcataccacttgcctctggtgcagcatgtgcagttcatcttcgacctcatggaatattcactcagcatcagtggcctcatcgactttgccattcagctgctgaatgaactgagtgtagttgaggctgagctgcttctcaaatcctcggatctggtgggcagctacactactagcctgtgcctgtgcatcgtggctgtcctgcggcactatcatgcctgcctcatcctcaaccaggaccagatggcacaggtctttgaggggctgtgtggcgtcgtgaagcatgggatgaaccggtccgatggctcctctgcagagcgctgtatccttgcttatctctatgatctgtacacctcctgtagccatttaaagaacaaatttggggagctcttcagcgacttttgctcaaaggtgaagaacaccatctactgcaacgtggagccatcggaatcaaatatgcgctgggcacctgagttcatgatcgacactctagagaaccctgcagctcacaccttcacctacacggggctaggcaagagtcttagtgagaaccctgctaaccgctacagctttgtctgcaatgcccttatgcacgtctgtgtggggcaccatgatcccgatagggtgaatgacatcgcaatcctgtgtgcagagctgaccggctattgcaagtcactgagtgcagaatggctaggagtgcttaaggccttgtgctgctcctctaacaatggcacttgtggtttcaacgatctcctctgcaatgttgatgtcagtgacctatcttttcatgactcgctggctacttttgttgccatcctcatcgctcggcagtgtttgctcctggaagatctgattcgctgtgctgccatcccttcactccttaatgctgcttgtagtgaacaggactctgagccaggggcccggcttacctgccgcatcctccttcaccttttcaagacaccgcagctcaatccttgccagtctgatggaaacaagcctacagtaggaatccgctcctcctgcgaccgccacctgctggctgcctcccagaaccgcatcgtggatggagccgtgtttgctgttctcaaggctgtgtttgtacttggggatgcggaactgaaaggttcaggcttcactgtgacaggaggaacagaagaacttccagaggaggagggaggaggtggcagtggtggtcggaggcagggtggccgcaacatctctgtggagacagccagtctggatgtctatgccaagtacgtgctgcgcagcatctgccaacaggaatgggtaggagaacgttgccttaagtctctgtgtgaggacagcaatgacctgcaagacccagtgttgagtagtgcccaggcgcagcgcctcatgcagctcatttgctatccacatcgactgctggacaatgaggatggggaaaacccccagcggcagcgcataaagcgcattctccagaacttggaccagtggaccatgcgccagtcttccttggagctgcagctcatgatcaagcagacccctaacaatgagatgaactccctcttggagaacatcgccaaggccacaatcgaggttttccaacagtcagcagagacagggtcatcttctggaagtactgcaagcaacatgcccagcagcagcaagaccaagcctgtgctcagctctctagagcgctctggtgtatggctggtggcccccctcattgctaaactgcccacctcagtccagggacatgtgttaaaggctgctggggaagaattggagaagggtcagcacctgggttcctcttcacgcaaagaacgtgatcgacaaaagcagaagagcatgtccctattgagccagcagcccttcttatcgctggtgctaacatgtctgaaagggcaggatgaacaacgcgagggactccttacctccctctacagccaggtgcaccagattgtgaataattggcgagatgaccagtacttagatgattgcaaaccaaagcagcttatgcatgaggcactcaaactgcggctcaacctggtggggggcatgtttgacacggtgcagcgcagcacccagcagaccacggagtgggccatgctcctcctggagatcatcatcagcggcactgtcgacatgcagtccaacaatgagctcttcactactgtgttggacatgctgagcgtgctcatcaatgggacattggctgcagacatgtctagcatctcgcaaggtagcatggaggaaaacaagcgtgcatacatgaacctggcgaagaagttgcagaaggagttgggggagcgccagtcagacagtctggaaaaggttcgccagctgctgccactgcccaagcagacccgagatgtcatcacgtgtgagccacagggctcccttatcgataccaagggcaacaagattgctggcttcgattccatcttcaagaaggagggtctacaggtttccaccaaacagaagatctcgccctgggatctttttgaggggttgaagccgtcagcaccactctcttggggctggtttggaacagtccgagtggaccggcgagtggctcgaggagaggagcagcagcggttgctgctctaccacacacacctgaggccccggccccgcgcctattacctggagccactgccactgcccccagaagatgaggagccgcctgctcctaccctgctagagcctgagaaaaaggctccagagccccccaaaactgacaaaccgggggctgctccacccagtactgaggaacgcaagaagaagtccaccaagggcaagaaacgcagccagccagctaccaagacagaggactatggaatgggcccgggtcggagcggcccttatggtgtgacagtgcctccggacctcctgcaccacccaaaccctggttctataacacaccttaactacaggcaaggctccataggcctgtacacccagaaccagccactacctgcaggtggccctcgtgtggacccataccgtcctgtgcgcttaccaatgcagaagctgcccacccgaccaacttaccctggagtgctgcccacaaccatgactggcgtcatgggtttagaaccctcctcttataagacctctgtgtaccggcagcagcaacctgcggtgccccaaggacagcgccttcgccaacagctccagcagagtcagggcatgttgggacagtcatctgtccatcagatgactcccagctcttcctacggtttgcagacttcccagggctatactccttatgtttctcatgtgggattgcagcaacacacaggccctgcaggtaccatggtgccccccagctactccagccagccttaccagagcacccacccttctaccaatcctactcttgtagatcctacccgccacctgcaacagcggcccagtggctatgtgcaccagcaggcccccacctatggacatggactgacctccactcaaaggttttcacaccagacactgcagcagacacccatgataagtaccatgactccaatgagtgcccagggcgtccaggcaggcgtccgttcaacagccatcctacctgagcagcagcagcagcagcaacagcagcaacagcaacagcagcagcagcagcaacagcaacagcagcagcagcagcagcagtaccacatccggcagcagcagcagcagcagatcctgcggcagcagcagcaacagcaacagcagcagcagcagcagcagcaacagcaacagcagcagcagcaacagcaacaacagcaacaccagcagcaacagcagcaacaggcggctcctccccaaccccagccccagtcccagccccagttccagcgccaggggcttcagcagacccagcagcagcaacagacagcagctttggtccggcaacttcaacaacagctctctaatacccagccacagcccagtaccaacatatttggacgctactgagccacctggaggaactgcttgtgcactggatgtggccccaccctttcctcttaattcccaatcccattcctgggctagcaccagtagtggttggggccctcccctcaggctccatttttaataagtttttagtatttttgttaatgtgaggcattgagctgttgggttttgtatattatttatatagagaccccagagctgttgcacccaatacacagagcttctttgcaaagggaaaaaaaaaaaaaaaaa

SEQ ID NO: 1082 - DNA, 1859 bp, Homo sapiens
gaattccaaattcctctgcagaggctcacaccccatggtgactgtcgctggagataaggtctttaaggaggcaatcatggtaatatggcagcttaagggtgggaccctcatccaacaagactggtgtcctcctgagaacggaaaaacactgaagaccacacacacggaaaagaccaggtgaggcacagaatgggaagaagccaaacctgccagtgccttgatcatggactctcaacctccagaactgtgagaaaatacgtttgggcctcccagtctgtggtattttgtcgtggcagcccgagctgactaacgtaggcgccaagcccctccagagccacgtggcacccgtggctgatcagcctgccatgctggcagatctaccctgtagggccaaaaatgcttctacctgcaactgcccatcaataacatctgcatggctgtttgcagagggcaaccaaagaagaaagttcagtcccactgcaccaacccagctgatggaacagagtcccacatggcactctcctaaactgggcagcgacgccacttacttccagaatacagggaagattctgaagcctgccggggagctgagtggacccgcatgcactcactcatccactccacaggcatttgtcccaggggctccaggtatgatgggaagccagggtgcacagggccagaggcgacaaacacattcctgccgggtcccagagaacggaggctggccaggaatacgggcggcatgaactacgctcaggctgcaggtgccaagcacttacacttgtttcctttggagtaaagctagaggaaacagaggctccaaattcaaaaggctttcctgaaagcacacagctagaaagaagctgcaccagacttcacttgaggactcttcttagacatgacatatactgcctctcaacaagcagctgtactgtggaggagaaagtagaaaagtgccacaagagatttaaaaaaaataataataatgctcctgggcctgagacagggaaggagtacagcatttctgttttatttctgggggctggggagcagagcagaacattcaggaaagacattcattctgcaagcatttactggggatatactattcgccaggcatgcatgtaaaagaggagccacgtgcccagagggatgggaagacagcacgttccaaccatgaagtcggggagcagaaggaagcacaggtgagggagagtccatgggaactggcgggccagcagcagcagcagcagcagcagcagcagcagcagcagaggagcccatgcggcaggaacaggagcccatacctgagcactgaggcacccagccacctgtcacgatactcggaggactgggctacagaggccgcacaccccagcaaccaacttctccccgctcctagcaggcccttaagtcgctgttgctgagctcccctcacccccttaaatatctctttcccaccaagatgcaaaaggcaacaccatcctctagcatttgcccagctctgtgcgtgtttaatttccttactatttgcaagaagtcattcaaaatgttgacagcatcttaacagtttgcacatgatatatctgcacatcttacaggttagcatccgtgtcaaaagtcaccaatgaacacatcacaatctctccatttccattctctttcaaaggctgcagaatgtctggttcaacactaagcagacttttttccgcaaaattacaaggaaacactgaacaagggcagatgcacaaaatgatacccatgacgcctgacaaacaactccgtgttgacagaacagctcgaggcccttccccattccagtggatcagcgctgttattgccagctcagtatggaattc

SEQ ID NO: 1083 - DNA, 1240 bp, Homo sapiens
accgtgcactcgccagacatataccgcgtggtggtggagggtgagcggggcaaccggccccacatctactgtctggagcagttgctgcaggaggcgatcatcgatgtgaggccagcctccactcgcttcttgccacaagggaccaggattgcagcctactggagccagcagtaccgctgtctctacccaggcactgtggtccgagggttactggacctggaggacgatggggacttgatcaccgtggagtttgacgacggagacacgggcaggatccccctctcacatatccgcctcctgccccctgactataagatacagtgtgctgagccgcccccggcccttctggtgccaagtgccaagcgccgcagccggaagaccagcaaagacactggggagggcaaagatggtggcacggctgggtcggaggagccaggagccaaggcccgtgggcgtgggcggaaacccagcgccaaggccaagggtgacagagccgctaccctggaggaggggaacccaacagacgaggtccccagtacccccttagccctggagccgagcagcaccccaggttccaagaagagccccccagagcctgtggacaagcgagccaaggcccccaaggcgcgcccggcaccgccgcagcccagtcccgcaccacccgccttcaccagctgcccagcacccgagtcatttgcagagctgccagctcctgccacctccctggccccagcacccctcatcaccatgcctgccacacgccccaagcccaagaaggcgcgggcagccgaggagtcgggtgccaagggccctcggaggccgggggaggaggccgagctgcttgtcaaactggaccacgagggtgtcacgtcacccaaaagcaagaaggctaaagaggccctgctgctccgggaggatccgggggcggggggctggcaggagcccaagagcctcctgagcctgggcagctatccccccgcggccggcagcagcgagcccaaggcaccctggcccaaggccaccgacggggacctcgcccaggagcccgggccggggctcacgttcgaggactctgggaaccccaagagcccagacaaggtccaggctgagcaggacggggccgaagagtccgagagcagcagcagcagcagtagtggcagcagtagcagcagcagcagcagcagcagcagcggctcggagacagaaggggaggaggaaggcgacaagaacggggacgggg

SEQ ID NO: 1084 - DNA, 533 bp, Homo sapiens
  modified_base (31)..(31): a, c, t, g, unknown or other
  modified_base (95)..(95): a, c, t, g, unknown or other
  modified_base (256)..(256): a, c, t, g, unknown or other
  modified_base (346)..(346): a, c, t, g, unknown or other
  modified_base (374)..(374): a, c, t, g, unknown or other
  modified_base (392)..(392): a, c, t, g, unknown or other
  modified_base (435)..(435): a, c, t, g, unknown or other
  modified_base (455)..(455): a, c, t, g, unknown or other
  modified_base (513)..(513): a, c, t, g, unknown or other
  modified_base (515)..(515): a, c, t, g, unknown or other
  modified_base (520)..(520): a, c, t, g, unknown or other
agtagatatacattgcataggcagcaacagnaatattctggtggggctggatccctggctggcccttcagggggcttcttccctggcaaccttgntcttcgaagcctcggacctgattcaaggtttttacaggaaaggcagctgcagctgcagcagcaacgtatgcagctggcccagaaactgcagcagcagcagcagcagcaacagcagcagcagcaccttctaggacaggtggcaatccagcagcaacagcagnagggtcctggagtacagacaaaccaagttctgggtcccaagccccagggtcttatgcctcccagcagccaccaaggtctcctggtccagnaggtgtcccctcaacccaccccaggggncccagggtatgcttgggncctgccccaggttggcttgttgttgcagcagcagcaccctggngctttggggccccccagggncctcacaggacaggtgttttatgacccagtcccgggtggtcaagttcccccctaggtngnacagnagggtcaagggcc

SEQ ID NO: 1085 - DNA, 2013 bp, Homo sapiens
  modified_base (301)..(301): a, c, t, g, unknown or other
  modified_base (1707)..(1707): a, c, t, g, unknown or other
  modified_base (1722)..(1722): a, c, t, g, unknown or other
  modified_base (1756)..(1756): a, c, t, g, unknown or other
  modified_base (1880)..(1880): a, c, t, g, unknown or other
  modified_base (1882)..(1882): a, c, t, g, unknown or other
  modified_base (1885)..(1885): a, c, t, g, unknown or other
  modified_base (1887)..(1887): a, c, t, g, unknown or other
gaattccaatcagaacaagctgttctcagacattaatctgaatgatcaggagtggcaagaattaatagatgaattggacaacacggttcctgaggatgacatacaggacctgttcaacgaagactttgaagagaagaaggagccagaattctcgcagacagcaactgagcacccctctctcccaggagagtgcgagcgtgaagagcgacccctctcactctcccttcggacatgtctccatgggatctccccaggcgaggtcttcttcttctggtcctcccttttcttctgtctccacggncactagtttaccttctggtgacagcactcccgcaggtccaaaccctgcaagctcaccagcaaacttgtgcttgtccagtccccttcaaaacttccaaaccaagcccacactccaggccaagctccacctcggcctggaaatggttatctcctgaatccggcagcagtgacagtggccggttcagcgtcagggcctgtggctgtgcccagctctgacatgtctccagcagaacagctcaaacagatggctgcacagcagcaacaaagggccaaactcatgcagcagaaacagcaacagcaacagcagcagcagcagcagcagcagcaacagcactcaaatcagacttcaaattggtctcccttaggacctccctctagtccatatggagcagcttttactgcagaaaaaccaaatagcccaatgatgtacccccaagcctttaacaaccaaaaccctatagtgcctccaatggcaaacaacctgcagaagacaacaatgaataactacctccctcagaatcacatgaatatgatcaatcagcagccaaataacttgggtacaaactccttaaacaaacagcacaatattctgacttatggcaacactaaacccctgacccacttcaatgcagacctgagtcagaggatgacaccaccagtggccaaccccaacaaaaaccccttgatgccgtatatccagcagcagcaacagcagcagcaacagcaacagcagcagcagcagcagcagcagccgccacctccacagctccaggcccccagggcacacctgagcgaagaccagaaacgcctgcttctcatgaagcagaaaggagtgatgaatcagcccatggcttacgctgcacttccatcccacggtcaggtaagtgtgaaagtgacacactcttcgagcagttcttgtggtgcatttcaagactgtcgatgtgtgatgttctacaaagcttccactgtagtggggtctaattgcctgcagaaaacctctttacaacatcctcaggtagtggccaggtttggagtgttctttttccatttctcctaagaaatggaaaagggtggcatgataaactttcgtgtatttcagtgtctaggaatcaaacttcttttattcccaactgcagataagaattacataaaattctcactctgagggagggaggctgcagaggtcactccaccaaacacggcactacctctgtagcttctctcccagcttgcatgatcccaggctctgggtggtgggaagcaggggacattcagggctgtctacaacagttttataaggccctgagcagccttcgagttttttaaattttattttagtgaatacatgcattaaaataaaacaacaacaacaacaacaacaaaaacacaaagaggctagagatttcnccgtttctacccccnaaataacgcttgctatcaagactttggagggggntgggggaaaagaatttaaaagccaaataatttttttttcataaaaagtaaaagctaccataaaacatttttttttctgtcacactgattaaatttcttctgaaaagccgcacatatagacaaancnaancnaaaattcctgaactggacaaacagcaaatactcaacagggttgttaacctaggtaacagttcagtagtttaaagaatcttttagacatctggaagcctttctattcattcctcagtacagtgttcc

SEQ ID NO: 1086 - DNA, 2586 bp, Homo sapiens
gattggggttttcccctcccatgtgctcaagactggcgctaaaagttttgagcttctcaaaagtctagagccaccgtccagggagcaggtagctgctgggctccggggacactttgcgttcgggctgggagcgtgctttccacgacggtgacacgcttccctggattggcagccagactgccttccgggtcactgccatggaggagccgcagtcagatcctagcgtcgagccccctctgagtcaggaaacattttcagacctatggaaactacttcctgaaaacaacgttctgtcccccttgccgtcccaagcaatggatgatttgatgctgtccccggacgatattgaacaatggttcactgaagacccaggtccagatgaagctcccagaatgccagaggctgctccccccgtggcccctgcaccagcagctcctacaccggcggcccctgcaccagccccctcctggcccctgtcatcttctgtcccttcccagaaaacctaccagggcagctacggtttccgtctgggcttcttgcattctgggacagccaagtctgtgacttgcacgtactcccctgccctcaacaagatgttttgccaactggccaagacctgccctgtgcagctgtgggttgattccacacccccgcccggcacccgcgtccgcgccatggccatctacaagcagtcacagcacatgacggaggttgtgaggcgctgcccccaccatgagcgctgctcagatagcgatggtctggcccctcctcagcatcttatccgagtggaaggaaatttgcgtgtggagtatttggatgacagaaacacttttcgacatagtgtggtggtgccctatgagccgcctgaggttggctctgactgtaccaccatccactacaactacatgtgtaacagttcctgcatgggcggcatgaaccggaggcccatcctcaccatcatcacactggaagactccagtggtaatctactgggacggaacagctttgaggtgcgtgtttgtgcctgtcctgggagagaccggcgcacagaggaagagaatctccgcaagaaaggggagcctcaccacgagctgcccccagggagcactaagcgagcactgcccaacaacaccagctcctctccccagccaaagaagaaaccactggatggagaatatttcacccttcagatccgtgggcgtgagcgcttcgagatgttccgagagctgaatgaggccttggaactcaaggatgcccaggctgggaaggagccaggggggagcagggctcactccagccacctgaagtccaaaaagggtcagtctacctcccgccataaaaaactcatgttcaagacagaagggcctgactcagactgacattctccacttcttgttccccactgacagcctcccacccccatctctccctcccctgccattttgggttttgggtctttgaacccttgcttgcaataggtgtgcgtcagaagcacccaggacttccatttgctttgtcccggggctccactgaacaagttggcctgcactggtgttttgttgtggggaggaggatggggagtaggacataccagcttagattttaaggtttttactgtgagggatgtttgggagatgtaagaaatgttcttgcagttaagggttagtttacaatcagccacattctaggtaggggcccacttcaccgtactaaccagggaagctgtccctcactgttgaattttctctaacttcaaggcccatatctgtgaaatgctggcatttgcacctacctcacagagtgcattgtgagggttaatgaaataatgtacatctggccttgaaaccaccttttattacatggggtctagaacttgacccccttgagggtgcttgttccctctccctgttggtcggtgggttggtagtttctacagttgggcagctggttaggtagagggagttgtcaagtctctgctggcccagccaaaccctgtctgacaacctcttggtgaaccttagtacctaaaaggaaatctcaccccatcccacaccctggaggatttcatctcttgtatatgatgatctggatccaccaagacttgttttatgctcagggtcaatttcttttttcttttttttttttttttttctttttctttgagactgggtctcgctttgttgcccaggctggagtggagtggcgtgatcttggcttactgcagcctttgcctccccggctcgagcagtcctgcctcagcctccggagtagctgggaccacaggttcatgccaccatggccagccaacttttgcatgttttgtagagatggggtctcacagtgttgcccaggctggtctcaaactcctgggctcaggcgatccacctgtctcagcctcccagagtgctgggattacaattgtgagccaccacgtccagctggaagggtcaacatcttttacattctgcaagcacatctgcattttcaccccacccttcccctccttctccctttttatatcccatttttatatcgatctcttattttacaataaaactttgctgccacctgtgtgtctgaggggtg

SEQ ID NO: 1087 - DNA, 4802 bp, Homo sapiens
gctggggcccgacccgggattagttggtttcggagcggaggagggagccccgaccgtcacgagcgtcgaagagacaaagccgcgtcagggggcccggccggggcgggggagcccggggcttgttggtgccccagcccgcgcggagggcccttcggacccgcgcgccgccgctgccgccgccgccgcctcgcaacaggtccgggcggcctcgctctccgctcccctcccccgcatccgcgaccctccggggcacctcagctcggccggggccgcagtctggccacccgcttccatgcggttcgggtccaagatgatgccgatgtttcttaccgtgtatctcagtaacaatgagcagcacttcacagaagttccagttactccagaaacaatatgcagagacgtggtggatctgtgcaaagaacccggcgagagtgattgccatttggctgaagtgtggtgtggctctgtagagatagagtttcatcatgttggccaggatggtctcgatctcctgaccttgtgatccgcctgcctcggcctcccaaagtgctggattacaggtgtgagccaccacgatcagcctctagtgtttaaaaaagaacgtccagttgcggataatgagcgaatgtttgatgttcttcaacgatttggaagtcagaggaacgaagttcgcttcttccttcgtcatgaacgcccccctggcagggacattgtgagtggaccaagatctcaggatccaagtttaaaaagaaatggtgtaaaagttcctggtgaatatcgaagaaaggagaacggtgttaatagtcctaggatggatctgactcttgctgaacttcaggaaatggcatctcgccagcagcaacagattgaagcccagcaacaattgctggcaactaaggaacagcgcttaaagtttttgaaacaacaagatcagcgacaacagcaacaagttgctgagcaggagaaacttaaaaggctaaaagaaatagctgagaatcaggaagctaagctaaaaaaagtgagagcacttaaaggccacgtggaacagaagagactaagcaatgggaaacttgtggaggaaattgaacagatgaataatttgttccagcaaaaacagagggagctcgtcctggctgtgtcaaaagtagaagaactgaccaggcagctagagatgctcaagaacggcaggatcgacagccaccatgacaatcagtctgcagtggctgagcttgatcgcctctataaggagctgcagctaagaaacaaattgaatcaagagcagaatgccaagctacaacaacagagggagtgtttgaataagcgtaattcagaagtggcagtcatggataagcgtgttaatgagctgagggaccggctgtggaagaagaaggcagctctacagcaaaaagaaaatctaccagtttcatctgatggaaatcttccccagcaagccgcgtcagccccaagccgtgtggctgcagtaggtccctatatccagtcgtctactatgcctcggatgccctcaaggcctgaattgctggtgaagccagccctgccggatggttccttggtcattcaggcttcagaggggccgatgaaaatacagacactgcccaacatgagatctggggctgcttcacaaactaaaggctctaaaatccatccagttggccctgattggagtccttcaaatgcagatcttttcccaagccaaggctctgcttctgtacctcaaagcactgggaatgctctggatcaagttgatgatggagaggttccgctgagggagaaagagaagaaagtgcgtccgttctcaatgtttgatgcagtagaccagtccaatgccccaccttcctttggtactctgaggaagaaccagagcagtgaagatatcttgcgggatgctcaggttgcaaataaaaatgtggctaaagtaccacctcctgttcctacaaaaccaaaacagattaatttgccttattttggacaaactaatcagccaccttcagacattaagccagacggaagttctcagcagttgtcaacagttgttccgtccatgggaactaaaccaaaaccagcagggcagcagccgagagtgctgctatctcccagcataccttcggttggccaagaccagaccctttctccaggttctaagcaagaaagtccacctgctgctgccgtccggccctttactccccagccttccaaagacaccttacttccacccttcagaaaaccccagaccgtggcagcaagttcaatatattccatgtatacgcaacagcaggcgccaggaaaaaacttccagcaggctgtgcagagcgcgttgaccaagactcataccagagggccacacttttcaagtgtatatggtaagcctgtaattgctgctgcccagaatcaacagcagcacccagagaacatttattccaatagccagggcaagcctggcagtccagaacctgaaacagagcctgtttcttcagttcaggagaaccatgaaaacgaaagaattcctcggccactcagcccaactaaattactgcctttcttatctaatccttaccgaaaccagagtgatgctgacctagaagccttacgaaagaaactgtctaacgcaccaaggcctctaaagaaacgtagttctattacagagccagagggtcctaatgggccaaatattcagaagcttttatatcagaggaccaccatagcggccatggagaccatctctgtcccatcatacccatccaagtcagcttctgtgactgccagctcagaaagcccagtagaaatccagaatccatatttacatgtggagcccgaaaaggaggtggtctctctggttcctgaatcattgtccccagaggatgtggggaatgccagtacagagaacagtgacatgccagctccttctccaggccttgattatgagcctgagggagtcccagacaacagcccaaatctccagaataacccagaagaaccaaatccagaggctccacatgtgcttgatgtgtacctggaggagtaccctccatacccacccccaccatacccatctggggagcctgaagggcccggagaagactcggtgagcatgcgcccgcctgaaatcaccgggcaggtctctctgcctcctggtaaaaggacaaacttgcgtaaaactggctcagagcgtatcgctcatggaatgagggtgaaattcaacccccttgctttactgctagattcgtctttggagggagaatttgaccttgtacagagaattatttatgaggttgatgacccaagcctccccaatgatgaaggcatcacggctcttcacaatgctgtgtgtgcaggccacacagaaatcgttaagttcctggtacagtttggtgtaaatgtaaatgctgctgatagtgatggatggactccattacattgtgctgcctcatgtaacaacgtccaagtgtgtaagtttttggtggagtcaggagccgctgtgtttgccatgacctacagtgacatgcagactgctgcagataagtgcgaggaaatggaggaaggctacactcagtgctcccaatttctttatggagttcaggagaagatgggcataatgaataaaggagtcatttatgcgctttgggattatgaacctcagaatgatgatgagctgcccatgaaagaaggagactgcatgacaatcatccacagggaagacgaagatgaaatcgaatggtggtgggcgcgccttaatgataaggagggatatgttccacgtaacttgctgggactgtacccaagaattaaaccaagacaaaggagcttggcctgaaacttccacacagaattttagtcaatgaagaattaatctctgttaagaagaagtaatacgattatttttggcaaaaatttcacaagacttattttaatgacaatgtagcttgaaagcgatgaagaatgtctctagaagagaatgaaggattgaagaattcaccattagaggacatttagcgtgatgaaataaagcatctacgtcagcaggccatactgtgttggggcaaaggtgtcccgtgtagcactcagataagtatacagcgacaatcctgttttctacaagaatcctgtctagtaaataggatcatttattgggcagttgggaaatcagctctctgtcctgttgagtgttttcagcagctgctcctaaaccagtcctcctgccagaaaggaccagtgccgtcacatcgctgtctctgattgtccccggcaccagcaggcccttggggggctcacctgaaggctcgaaggcactgcacacttgtatattgtcagtgaagaactgttagttggttgtcagtgaacaataactttattatatgagtttttgtagcatcttaagaattatacatatgtttgaaatattgaaactaagctacggtaccagtaattagatgtagaatcttgtttgtaggctgaattttaatctgtatttattgtcttttgtatctcagaaattagaaacttgctacagacttacccgtaatatttgtcaagatcatagctgactttaaaaacagttgtaataaactttttgatgctagctgtttactggtttttgtttttgatgtcataaatagaccttgtttaatagtcacaagccgttgggatatcatacccagctgaaaaagaacaaactgcttaacataagtatatgtatcgtaataagagttttttaccagctaagtgattcaatgtaagtggtttttaaaataaaatactgtagagatcatggtgaaaaaaaaaaaaaa

SEQ ID NO: 1088 - DNA, 4927 bp, Homo sapiens
cccggctttatatctatatatacacaggtatatgtgtatattttatataattgttctccgttcgttgatatcaaagacagttgaaggaaatgaattttgaaacttcacggtgtgccaccctacagtactgccctgacccttacatccagcgtttcgtagaaaccccagctcatttctcttggaaagaaagttattaccgatccaccatgtcccagagcacacagacaaatgaattcctcagtccagaggttttccagcatatctgggattttctggaacagcctatatgttcagttcagcccattgacttgaactttgtggatgaaccatcagaagatggtgcgacaaacaagattgagattagcatggactgtatccgcatgcaggactcggacctgagtgaccccatgtggccacagtacacgaacctggggctcctgaacagcatggaccagcagattcagaacggctcctcgtccaccagtccctataacacagaccacgcgcagaacagcgtcacggcgccctcgccctacgcacagcccagctccaccttcgatgctctctctccatcacccgccatcccctccaacaccgactacccaggcccgcacagtttcgacgtgtccttccagcagtcgagcaccgccaagtcggccacctggacgtattccactgaactgaagaaactctactgccaaattgcaaagacatgccccatccagatcaaggtgatgaccccacctcctcagggagctgttatccgcgccatgcctgtctacaaaaaagctgagcacgtcacggaggtggtgaagcggtgccccaaccatgagctgagccgtgaattcaacgagggacagattgcccctcctagtcatttgattcgagtagaggggaacagccatgcccagtatgtagaagatcccatcacaggaagacagagtgtgctggtaccttatgagccaccccaggttggcactgaattcacgacagtcttgtacaatttcatgtgtaacagcagttgtgttggagggatgaaccgccgtccaattttaatcattgttactctggaaaccagagatgggcaagtcctgggccgacgctgctttgaggcccggatctgtgcttgcccaggaagagacaggaaggcggatgaagatagcatcagaaagcagcaagtttcggacagtacaaagaacggtgatggtacgaagcgcccgtttcgtcagaacacacatggtatccagatgacatccatcaagaaacgaagatccccagatgatgaactgttatacttaccagtgaggggccgtgagacttatgaaatgctgttgaagatcaaagagtccctggaactcatgcagtaccttcctcagcacacaattgaaacgtacaggcaacagcaacagcagcagcaccagcacttacttcagaaacagacctcaatacagtctccatcttcatatggtaacagctccccacctctgaacaaaatgaacagcatgaacaagctgccttctgtgagccagcttatcaaccctcagcagcgcaacgccctcactcctacaaccattcctgatggcatgggagccaacattcccatgatgggcacccacatgccaatggctggagacatgaatggactcagccccacccaggcactccctcccccactctccatgccatccacctcccactgcacacccccacctccgtatcccacagattgcagcattgtcagtttcttagcgaggttgggctgttcatcatgtctggactatttcacgacccaggggctgaccaccatctatcagattgagcattactccatggatgatctggcaagtctgaaaatccctgagcaatttcgacatgcgatctggaagggcatcctggaccaccggcagctccacgaattctcctccccttctcatctcctgcggaccccaagcagtgcctctacagtcagtgtgggctccagtgagacccggggtgagcgtgttattgatgctgtgcgattcaccctccgccagaccatctctttcccaccccgagatgagtggaatgacttcaactttgacatggatgctcgccgcaataagcaacagcgcatcaaagaggagggggagtgagcctcaccatgtgagctcttcctatccctctcctaactgccagccccctaaaagcactcctgcttaatcttcaaagccttctccctagctcctccccttcctcttgtctgatttcttaggggaaggagaagtaagaggctacctcttacctaacatctgacctggcatctaattctgattctggctttaagccttcaaaactatagcttgcagaactgtagctgccatggctaggtagaagtgagcaaaaaagagttgggtgtctccttaagctgcagagatttctcattgacttttataaagcatgttcacccttatagtctaagactatatatataaatgtataaatatacagtatagatttttgggtggggggcattgagtattgtttaaaatgtaatttaaatgaaagaaaattgagttgcacttattgaccattttttaatttacttgttttggatggcttgtctatactccttcccttaaggggtatcatgtatggtgataggtatctagagcttaatgctacatgtgagtgacgatgatgtacagattctttcagttctttggattctaaatacatgccacatcaaacctttgagtagatccatttccattgcttattatgtaggtaagactgtagatatgtattcttttctcagtgttggtatattttatattactgacatttcttctagtgatgatggttcacgttggggtgatttaatccagttataagaagaagttcatgtccaaacgtcctctttagtttttggttgggaatgaggaaaattcttaaaaggcccatagcagccagttcaaaaacacccgacgtcatgtatttgagcatatcagtaacccccttaaatttaataccagataccttatcttacaatattgattgggaaaacatttgctgccattacagaggtattaaaactaaatttcactactagattgactaactcaaatacacatttgctactgttgtaagaattctgattgatttgattgggatgaatgccatctatctagttctaacagtgaagttttactgtctattaatattcagggtaaataggaatcattcagaaatgttgagtctgtactaaacagtaagatatctcaatgaaccataaattcaactttgtaaaaatcttttgaagcatagataatattgtttggtaaatgtttcttttgtttggtaaatgtttcttttaaagaccctcctattctataaaactctgcatgtagaggcttgtttacctttctctctctaaggtttacaataggagtggtgatttgaaaaatataaaattatgagattggttttcctgtggcataaattgcatcactgtatcattttcttttttaaccggtaagagtttcagtttgttggaaagtaactgtgagaacccagtttcccgtccatctcccttagggactacccatagacatgaaaggtccccacagagcaagagataagtctttcatggctgctgttgcttaaaccacttaaacgaagagttcccttgaaactttgggaaaacatgttaatgacaatattccagatctttcagaaatataacacatttttttgcatgcatgcaaatgagctctgaaatcttcccatgcattctggtcaagggctgtcattgcacataagcttccattttaattttaaagtgcaaaagggccagcgtggctctaaaaggtaatgtgtggattgcctctgaaaagtgtgtatatattttgtgtgaaattgcatactttgtattttgattattttttttttcttcttgggatagtgggatttccagaaccacacttgaaacctttttttatcgtttttgtattttcatgaaaataccatttagtaagaataccacatcaaataagaaataatgctacaattttaagaggggagggaagggaaagtttttttttattatttttttaaaattttgtatgttaaagagaatgagtccttgatttcaaagttttgttgtacttaaatggtaataagcactgtaaacttctgcaacaagcatgcagctttgcaaacccattaaggggaagaatgaaagctgttccttggtcctagtaagaagacaaactgcttcccttactttgctgagggtttgaataaacctaggacttccgagctatgtcagtactattcaggtaacactagggccttggaaattcctgtactgtgtctcatggatttggcactagccaaagcgaggcacccttactggcttacctcctcatggcagcctactctccttgagtgtatgagtagccagggtaaggggtaaaaggatagtaagcatagaaaccactagaaagtgggcttaatggagttcttgtggcctcagctcaatgcagttagctgaagaattgaaaagtttttgtttggagacgtttataaacagaaatggaaagcagagttttcattaaatccttttaccttttttttttcttggtaatcccctaaaataacagtatgtgggatattgaatgttaaagggatatttttttctattatttttataattgtacaaaattaagcaaatgttaaaagttttatatgctttattaatgttttcaaaaggtattatacatgtgatacattttttaagcttcagttgcttgtcttctggtactttctgttatgggcttttggggagccagaagccaatctacaatctctttttgtttgccaggacatgcaataaaatttaaaaaataaataaaaactaattaagaaattgaaaaaaaaaaaaaaaaaa

SEQ ID NO: 1089 - DNA, 2845 bp, Homo sapiens
aggggacgcagcgaaaccggggcccgcgccaggccagccgggacggacgccgatgcccggggctgcgacggctgcagagcgagctgccctcggaggccggcgtggggaagatggcccagtccaccgccacctcccctgatgggggcaccacgtttgagcacctctggagctctctggaaccagacagcacctacttcgaccttccccagtcaagccgggggaataatgaggtggtgggcggaacggattccagcatggacgtcttccacctggagggcatgactacatctgtcatggcccagttcaatctgctgagcagcaccatggaccagatgagcagccgcgcggcctcggccagcccctacaccccagagcacgccgccagcgtgcccacccactcgccctacgcacaacccagctccaccttcgacaccatgtcgccggcgcctgtcatcccctccaacaccgactaccccggaccccaccactttgaggtcactttccagcagtccagcacggccaagtcagccacctggacgtactccccgctcttgaagaaactctactgccagatcgccaagacatgccccatccagatcaaggtgtccaccccgccacccccaggcaccgccatccgggccatgcctgtttacaagaaagcggagcacgtgaccgacgtcgtgaaacgctgccccaaccacgagctcgggagggacttcaacgaaggacagtctgctccagccagccacctcatccgcgtggaaggcaataatctctcgcagtatgtggatgaccctgtcaccggcaggcagagcgtcgtggtgccctatgagccaccacaggtggggacggaattcaccaccatcctgtacaacttcatgtgtaacagcagctgtgtagggggcatgaaccggcggcccatcctcatcatcatcaccctggagatgcgggatgggcaggtgctgggccgccggtcctttgagggccgcatctgcgcctgtcctggccgcgaccgaaaagctgatgaggaccactaccgggagcagcaggccctgaacgagagctccgccaagaacggggccgccagcaagcgtgccttcaagcagagcccccctgccgtccccgcccttggtgccggtgtgaagaagcggcggcatggagacgaggacacgtactaccttcaggtgcgaggccgggagaactttgagatcctgatgaagctgaaagagagcctggagctgatggagttggtgccgcagccactggtggactcctatcggcagcagcagcagctcctacagaggccgagtcacctacagcccccgtcctacgggccggtcctctcgcccatgaacaaggtgcacgggggcatgaacaagctgccctccgtcaaccagctggtgggccagcctcccccgcacagttcggcagctacacccaacctggggcccgtgggccccgggatgctcaacaaccatggccacgcagtgccagccaacggcgagatgagcagcagccacagcgcccagtccatggtctcggggtcccactgcactccgccacccccctaccacgccgaccccagcctcgtcagttttttaacaggattggggtgtccaaactgcatcgagtatttcacctcccaagggttacagagcatttaccacctgcagaacctgaccattgaggacctgggggccctgaagatccccgagcagtaccgcatgaccatctggcggggcctgcaggacctgaagcagggccacgactacagcaccgcgcagcagctgctccgctctagcaacgcggccaccatctccatcggcggctcaggggaactgcagcgccagcgggtcatggaggccgtgcacttccgcgtgcgccacaccatcaccatccccaaccgcggcggcccaggcggcggccctgacgagtgggcggacttcggcttcgacctgcccgactgcaaggcccgcaagcagcccatcaaggaggagttcacggaggccgagatccactgagggcctcgcctggctgcagcctgcgccaccgcccagagacccaagctgcctcccctctccttcctgtgtgtccaaaactgcctcaggaggcaggaccttcgggctgtgcccggggaaaggcaaggtccggcccatccccaggcacctcacaggccccaggaaaggcccagccaccgaagccgcctgtggacagcctgagtcacctgcagaaccttctggagctgccctagtgctgggcttgtggggcgggggctggcccactctcagccctgccactgccccggcgtgctccatggcaggcgtgggtggggaccgcagcgtcggctccgacttccaggcttcatcctagagactgtcatctcccaaccaggcgaggtccttccaaaggaaaggatcctctttgctgatggactgccaaaaagtattttgcgacatcttttggttctggatagtagtgagcagccaagtgactgtgtctgaaacaccagtgtattttcagggaatgtccctaactgcgtcttgcccgcgccgggggctggggactctctctgctggacttgggactggcctctgcccccagcacgctgtattctgcaggaccgcctccttcctgcccctaacaacaaccacagtgttgctgaaattggagaaaactggggagggcgcaaccccccccaggcgcggggaagcatgtggtaccgcctcagccagtgcccctcagcctggccacagtcgcctctcctcggggacccctcagcagaaagggacagcctgtccttagaggactggaaattgtcaatatttgataaaatgatacccttttc

SEQ ID NO: 1090 - DNA, 4447 bp, Homo sapiens
ggagacgctgggcgcgctgtggggcgggggcgaggttcgggctggttgttccgttgcgagctgcagctgcgatctctgtggtaggcccagaagtgtatgctgacttgtaaagtgaagaagccagtggtgctgcgggtgttcttttggggtagtgtctgggatccagtacgagttgaatcattgttcaaataaggtgtaattgaaaagtgatcctctcttcagagatgtcaaaaacaaacaaatccaagtctggatctcgctcttctcgctcaagatctgcatcaagatctcgttctcgttcattttcgaagtctcggtcccgaagccgatctctctctcgttcaaggaagcgcaggctgagttctaggtctcgttccagatcatattctccagctcataacagagaaagaaaccacccaagagtatatcagaatcgggatttccgaggtcacaacagaggctatagaaggccctattatttccgtgggcgtaacagaggcttttatccatggggccaatataaccgaggaggctatggaaactaccgctcaaattggcagaattaccggcaagcatacagtcctcgtcgaggccgttcaagatcccggtccccaaagagaaggtccccttcaccaaggtccaggagccattctagaaactctgataagtcgtcttctgaccggtcaaggcgctcctcatcctcccgttcttcctccaaccatagccgagttgaatcttctaagcgcaagtctgcaaaggagaaaaagtcctcttctaaggatagccggccatctcaggctgccggggataaccagggagatgaggccaaggagcagacattctctggaggcacctctcaagatacaaaagcatctgagagctcgaagccatggccagatgccacctacggcactggttctgcatcacgggcctcagcagtttctgagctgagtcctcgggagcgaagcccagctctcaaaagccccctccagtctgtggtggtgaggcggcggtcaccccgtcctagccccgtgccaaaacctagtcctccactttccagcacatcccagatgggctcaactctgccgagtggtgccgggtatcagtctgggacacaccaaggtcagttcgaccatggttctgggtccctgagtccatccaaaaagagccctgtgggtaagagtccaccatccactggctccacatatggctcatctcagaaggaggagagtgctgcttcaggaggagcagcctatacaaagaggtatctagaagagcagaagacagagaatggaaaagataaggaacagaaacaaacaaataccgataaagaaaaaataaaagagaaagggagcttctctgacacaggcttgggtgatggaaaaatgaaatctgattcttttgctcccaaaactgattctgagaagccttttcggggcagtcagtctcccaaaaggtataagctccgagatgactttgagaagaagatggctgacttccacaaggaggagatggatgatcaagataaggacaaagctaagggaagaaaggaatctgagtttgatgatgaacccaaatttatgtctaaagtcataggtgcaaacaaaaaccaggaggaggagaagtcaggcaaatgggagggcctggtatatgcacctccagggaaggaaaagcagagaaaaacagaggagctggaggaggagtctttcccagagagatccaaaaaggaagatcggggcaagagaagcgaaggtgggcacaggggctttgtgcctgagaagaatttccgagtgactgcttataaagcagtccaggagaaaagctcatcacctcccccaagaaagacctctgagagccgagacaagctgggagcgaaaggagattttcccacaggaaagtcttccttttccattactcgagaggcacaggtcaatgtccggatggactcttttgatgaggacctcgcacgacccagtggcttattggctcaggaacgcaagctttgccgagatctagtccatagcaacaaaaaggaacaggagtttcgttccattttccagcacatacaatcagctcagtctcagcgtagcccctcagaactgtttgcccaacatatagtgaccattgttcaccatgttaaagagcatcactttgggtcctcaggaatgacattacatgaacgctttactaaatacctaaagagaggaactgagcaggaggcagccaaaaacaagaaaagcccagagatacacaggagaatagacatttcccccagtacattcagaaaacatggtttggctcatgatgaaatgaaaagtccccgggaacctggctacaaggctgagggaaaatacaaagatgatcctgttgatctccgccttgatattgaacgtcgtaaaaaacataaggagagagatcttaaacgaggtaaatcgagagaatcagtggattcccgagactccagtcactcaagggaaaggtcagctgaaaaaacagagaaaactcataaaggatcaaagaaacagaagaagcatcggagagcaagagacaggtccagatcctcctcctcttcctcccagtcatctcactcctacaaagcagaagagtacactgaagagacagaggaaagagaggagagcaccacgggctttgacaaatcaagactggggaccaaagactttgtgggtccaagtgaaagaggaggtggcagagctcgaggaacctttcagtttcgagccagaggaagaggctggggcagaggcaactactctgggaacaataacaacaacagcaacaacgattttcaaaaaagaaaccgggaagaggagtgggacccagagtacacacccaaaagcaagaagtattacttgcatgatgaccgtgaaggcgaaggcagtgacaagtgggtgagccggggccggggccgaggagcctttcctcggggtcggggccggttcatgttccggaaatcaagtaccagccccaagtgggcccatgacaagttcagtggggaggaaggggagattgaagacgacgagagtgggacagagaaccgagaagagaaggacaatatacagcccacaaccgagtaggggccacccttgacgggattcctgcccaggggagagaggcgctgggaagatggctggtgaggagcttaacagaggaacctcaagaagattctgaaaatcctacccccaccccccaccagccgcacagattgtactaccgcgagaggcatccctggcgctgtctcccactggacagaggaggctggccatggggcccaggggtcaggcccagcttttgagcagaatacaacgcattgggctttagctgtttttctcatttgttggtgtgtggggtgggggcaggggtagggcgggagagcgatgcttggatttttgtttcctattagaaaccaacagttttgttctaatttcatttcatttggagctaagatgactaatttgatgattttcgatctcttttcccctgtcctgattttaaaagccccctcctttttttttttttttttctttttttaggcatatgtagtaatattagaaacatttaatttgggaaactttgattcttgaaagagaaaacaaaagcatgtgaataaactttgaagtgttcacctcagtttgggaccaaactgcttggatctttgtaaaaaccggttttgtatgtcaaggaggagtttaaggcctttccgaccaccttgtgttccccttttctgcgcagccatgtatcacgtggagttgctccttaccacacctcacgtgcccctgagccctatttcctgatttcttctgggctggacttccccgttctccaccagcagctccagtatcccaaactttctagtcctgctgatcctcccagcaacggggtggaaactggagggcagtgtctggtctgttttctaagaaacttatgaattctattatctttacaaatatgagaaaattttttcaatattttttattaatctttttataaaatgaaaagaaactcctatgatcgattaaggaaggtggttatggctgggtggttcaggggtttttttgggtttctttttttttttctttgtctttttaaccttaagctgtttaagttgaagcattctcagatgtttggggggaaacatcctcttaaaatgggtccttgtgcttgccttctggggaggcggtcctgagcaggtgaatcataaggcatttatgcatatgttatatgcggactgcacccacctctcccccccagcctttgcctcttgcgttgttgtgctgctttccccttactttgctacatttctatagttaagttggttttacttgaatgattcatgtttagggggaaaatgaaaatctcccttaaaatttgtttcaactcctcctgcaaataaaataaatgaagtggcagatgtaaaaaaaaaaaaaaaaaa

SEQ ID NO: 1091 - DNA, 2952 bp, Homo sapiens
cagaagtctttgggaggcggccccacgcctcaggcgactggttgttaccgaggaagatggcggcgccagacccgaggcgctagggaagatcgcaccgcggacgcccgctgagcttggcgcacgggccgaccaggagctggtgactgccctcatgtgtgatttgcggcggccagcggcaggtgggatgatggacttggcctacgtctgtgagtgggagaaatggtccaagagcacccactgcccatcggtgcccctggcctgcgcctggtcctgccgaaatctcatcgccttcaccatggacctgcgcagcgatgaccaggacctgacccgcatgatccacatcctggacacggagcacccctgggacctgcactcgatcccctcagagcaccacgaggccatcacctgcctggagtgggaccagtcaggctcccggctcctgtcagcagatgccgacgggcagatcaagtgctggagcatggcggaccacctggctaatagctgggagagctcagtgggcagcctagtggagggggaccccattgtggccctgtcctggctgcacaatggtgtgaaactggccctgcacgtggagaagtcgggcgcctccagcttcggggagaagttctcccgagtcaagttctcaccgtcgctcacgctgttcggcggcaagcccatggagggctggatcgcggtgacggtcagcggcctggtcaccgtgtccctgctgaagcccagcgggcaggtgctgacgtccaccgagagcctgtgccggctgcgcggccgcgtggccctggccgacatcgccttcaccggcggcggcaacatcgtggtggccacggcggacggcagcagcgcgtcgcccgtgcagttctacaaggtgtgcgtgagcgtggtgagcgagaagtgccgtatcgacacggagatcctgccctccctgttcatgcgctgcaccaccgacctcaaccgcaaggacaagtttcccgccatcacccacctcaagttcctggcccgggacatgtcggagcaggtgcttttgtgcgcgtccagccagaccagcagcatcgtggagtgctggtccctgcgcaaggagggactccccgtgaacaacatcttccagcagatctcccccgtggttggcgacaaacagcccacaattctcaaatggcggatcctatcggccaccaacgatctggaccgtgtgtcggccgtggcgctgcccaagctgcccatctcgctcaccaacaccgacctcaaggtggccagcgacacacagttctaccctggcctcgggctggccctggccttccacgacggcagcgtccacatcgtgcaccggctctcactgcagaccatggccgtcttctacagctccgcggccccgaggcctgtggatgagccggccatgaagcgcccccgcaccgcgggccccgccgtccacttaaaggctatgcagctatcgtggacgtcactggccctggtggggattgacagccacgggaagctgagcgtgctccgcctctcaccttccatgggccacccgctggaggtggggctggcgctgcggcacctgctcttcctgctggagtactgcatggtgaccggctacgactggtgggacatcctgctgcacgtgcagcccagtatggtacagagcctggtggagaagctgcacgaggagtacacgcgccagaccgctgccctgcagcaggtcctctccacccggatcctggccatgaaggcctcgctctgcaagctgtcgccctgcacggtgacccgcgtgtgcgactaccacaccaagctcttcctcatcgccatcagctccaccctgaagtcgctgctgcgcccccactttctcaacacgcctgacaagagccccggcgaccggctgaccgagatctgcaccaagatcaccgacgtcgacattgacaaggtcatgatcaacctcaagacggaggaatttgtgctggacatgaacacactgcaggcgctgcagcagctcttgcagtgggtgggcgacttcgtgctgtacctgctggccagcctacccaaccagggttccctgctgaggccgggccacagctttctgcgggacggcacctcgctgggcatgcttcgggaattgatggtggtcatccgcatctggggccttctgaagcccagctgcctgcccgtgtatacggccacctcggatacccaggacagcatgtccctgctcttccgcctgctcaccaagctctggatctgctgtcgcgatgagggcccagcgagcgagccggacgaggcgctggtggatgaatgctgcctgctgcccagccagctgcttatccccagcctggactggctgccagccagcgacggcctggttagccgcctgcagcccaagcagccccttcgtctgcagtttggccgggcgcccacgctgcctggcagtgctgccaccctgcagctcgacggcctcgccagggccccaggccagcccaagatcgaccacctgcggaggctgcaccttggcgcttgccccacggaggaatgcaaggcctgcaccaggtgcggctgtgtcaccatgctcaagtcgcccaacagaaccacggcggtgaagcagtgggagcagcgctggatcaagaactgcctggctgttgaaggccgtgggccggacgcctgcgtgaccagcagagcttctgaggaagcccctgcctttgtccagctgggcccgcagtccacacaccactctcccaggacccccagatccctggaccatctgcatccagaggaccgtccgtgacggccgggggtccaggcggaccttgtggtgacccggctcgggcgtctcctcggtttccttgcctcacccgcggagagcgctgaacctggacaagcagcggctgggaaggacaggtccaataaacgccctctgcgcccagaaaaaaaaaaaaaaaaaaaaaaaaaaaa

SEQ ID NO: 1092 - DNA, 3962 bp, Homo sapiens
ctctgctcgccccccatctcaccccccaagcggatactggtcttctcgtcggattgcccatgcacttgttgcagaaacagccaaggccctggctgtggagaatgctgaaggaagaagacgcagaagcaggacgaccctgaaagattcagcctcttcatcctcaaacaggtcgcttctcgggagttcttggtgttggaatattttacagcaaagcagtcgaccaggcctcctcttcccacctgtccagcagcatgaaagcagcatgattggccgaccgcaggagaagcccccagaaccaggcccccaactcagccatctgcggaggtcaaggtgtgagcgacgtctcctcaccacagtgctgtgtggtctatacctcagccagggagaggatgtgaaaccccccgccctgcacatgagtggtacaggccaacaggaacacctggctccagccacgttcacagacatgtcagccgtggagtagtgctgacacttttctctcagcttctcagggtttcagtccttttgggtttggtttatttaccttttttatggttttgtggctggacgttcacaaccaaggcagacagcatgggtgaccagcaactgtacaagaccaaccatgtggcccatggtagtgagaaccttttctaccaacagccaccacttggcgtccacagcgggctgagcccactgatggctaccaatacacctactcccaggccagcgagatccggacccagaagcttaccagcggtgtcttacacaagctggactctttcacccaggtgtttgccaaccaaaacctgcgaattcaggtcaacaatatggcccaggtgctgcacactcagtcagcagtgatggatggagcccctgacagtgctctccgccagctgctgtctcagaagcccatggagcccccagcaccggctatcccttcccgctaccagcaggtgccccagcagcctcaccctggtttcactggtgggctgtccaaaccagctcttcaggtcgggcagcaccctacccaagggcacctgtattatgactaccagcagcctctggctcaggtgccagtgcagggaggacagccactgcaggccccacagatgctgtcacagcacatgcaacagatgcagcagcaccagtattacccaccgcagcaacagcagcaagccgggcaacagcgtatctccatgcaagaaatacagacgcagccgcaacaaattcgcccatcacagccacagccgccgccacagcagcagcagccgcagcagctacagctgcagcagcggcagggttcaatgcagatacctcagtattatcagccccaacccatgatgcagcacttgcaagagcagcagcagcaacagatgcacctgcagcctccttcttatcacagggaccctcaccagtataccccagagcaggcacacactgtccagctgattcccctgggctccatgtcccagtactactaccaggagccccagcagccctacagccaccccctttaccagcagagccacctgtcccagcaccagcagcgtgaggacagtcagctgaagacctactctagtgacagacaggcccaggccatgctgagctcccatggggacctggggcctcctgacacaggaatgggagacccagcgagctcagatctgacccgggtcagcagcaccctcccccatcgccccctcctatcccccagtgggatccacctcaacaacatggggcctcagcatcagcagctgtctcccagtgccatgtggccccagatgcacctacctgatgggagagcccagccagggtcccctgagtcaagtggccaacccaaaggagcgtttggggagcagtttgatgccaagaacaagctgacatgctccatctgcctgaaggagttcaagaacctgcctgccctgaatggccacatgcggtcccacgggggaatgagggcctcccccaacctcaaacaggaaatccccaggaagcatcagccgagtgtgcccaaagccgaggagcccctcaagaccgtgcaggagaagaaaaagttccggcaccggtcggaacctctcttcatcccgccgccgccctcctacaacccgaaccccgctgcctcctactcgggcgccaccctgtaccagagccagctgcgctccccgcgcgtcctcggggaccacctgctcctggaccccacccacgagctgcccccttacacgcccccacccatgctgagcccggtgcgccagggctcggggctcttcagcaatgtcctcatctccggccacggccctggcgcccacccgcagctgcccctgacgcccctgacgcccacaccacgggtgctgctgtgtcgctccaacagcatcgatggcagcaacgtgacggtcaccccagggcctggagagcagactgtagatgttgaaccacgcatcaacattggcttgagattccaagcagaaatccctgaactccaagatatctctgccctggcccaggacacacacaaggccacactggtatggaagccctggccagaactagaaaaccatgacctccagcaaagagtggagaatcttctgaatttgtgctgttccagtgcattgccaggtggagggaccaattctgaatttgctttgcactctctgtttgaggccaaaggtgatgtgatggttgctctggaaatgctgctactgcggaagcctgtcaggttaaaatgtcatcctttagcaaattaccactatgccggttcggacaagtggacctccctagaaagaaaactgtttaacaaagcactagccacttacagcaaagactttatttttgtacagaagatggtgaagtccaagacggtggctcagtgcgtggagtactactacacgtggaaaaagatcatgcggctggggcggaaacaccggacacgcctggcagaaatcatcgacgattgtgtgacaagtgaagaagaagaagagttagaggaggaggaggaggaggacccggaagaagataggaaatccacaaaagaagaagagagtgaggtgccgaagtccccggagccaccacccgtccccgtcctggctcccacggaggggccgcccctgcaggccctgggccagccctcaggctccttcatctgtgaaatgcccaactgtggggctgactgtagatgtcatgtcactccctttcttccccaggtgttcagctcccgacaggcactgaatggccatgcccgcatccacgggggcaccaaccaggtgaccaaggcccgaggtgccatcccctctgggaagcagaagcctggtggcacccagagtgggtactgttcggtaaagagctcaccctctcacagcaccaccagcggcgagacagaccccaccaccatcttcccctgcaaggagtgtggcaaagtcttcttcaagatcaaaagccgaaatgcacacatgaaaactcacaggcagcaggaggaacaacagaggcaaaaggctcagaaggcggcttttgcagctgagatggcagccacgattgagaggactacggggcccgtgggggcgccggggctgctgcccctggaccagctgagtctgatcaaacccatcaaggatgtggacatcctcgacgacgacgtcgtccagcagttgggaggtgtcatggaagaggctgaagttgtggacaccgatcttctcttggatgatcaagattcagtcttgcttcagggtgacgcagaactataaagccctgtgtgtcacttagagacagtgaaaacccacggcctccatcttcattaatcaggaaacctggactgcctgcttgttttgtaacccttttaaactacctgttttaaaagtggtcattttattcaggtttagaaaaaaaaatcctatttcttttccttttatttaaaaaaatttgtttttgtggggggttggggggaataaataattggcacaactaaaaaaaaaaaa

SEQ ID NO: 1093 - DNA, 3572 bp, Homo sapiens
gagtgtgtgacccagcccttcccccgtggccaagcagagagagtggccttgaggaagccatagcagcaggaccagcatggcctctgctgcctctgtgaccagcctggcagatgaagtcaactgccccatctgtcagggtaccctgagggagccggtcactatcgactgcggccacaacttctgccgggcctgccttacccgctactgtgagataccaggcccagacctggaggagtcccctacttgcccactctgcaaagaacccttccgtcctgggagcttccggcccaactggcagctggctaacgtggtggagaacattgagcgcctccagctggtgtccacactgggtttgggagaggaggatgtctgccaagagcacggagagaagatctacttcttctgtgaggatgatgagatgcagttgtgcgtggtgtgccgggaggctggggagcacgctacccacaccatgcgcttcctggaggatgcagcggctccctatagggaacaaatccataagtgtcttaaatgtctaagaaaagagagagaggagattcaagaaatccagtcaagagaaaataaaaggatgcaagtcctcctgactcaggtgtccaccaagagacaacaggtgatttctgagttcgcacacctgaggaagtttctagaggaacagcagagcatcctcttagcacaattggagagccaggatggggacatcttgaggcaacgggatgaatttgatttgctggttgctggggagatctgccggtttagtgctcttattgaagaactggaggagaagaatgagaggccagcaagggagctcctgacggacatcagaagcactctaataagatgtgaaaccagaaagtgccggaaaccggtggctgtgtcgccagagctgggccagaggattcgggactttccccagcaggccctcccgctgcagagggagatgaagatgtttctggaaaaactatgctttgagttggactatgagccagctcacatttctctagaccctcagacttcccaccccaagctcctcttgtccgaggaccaccagcgagctcagttctcctacaaatggcagaactcaccagacaacccccaacgttttgaccgggccacctgtgttctggcccacactggcatcacaggggggagacacacgtgggtggtgagtatagacctggcccatgggggcagctgcaccgtgggcgtggtgagcgaggatgtgcagcggaagggggagcttcggctgcggccagaggagggggtgtgggctgtgaggctggcttggggcttcgtctcggctctgggctccttccccacacggctgaccctgaaggagcagccccggcaggtgagggtgtctcttgactatgaggtgggctgggtgaccttcaccaacgctgtcacccgagagcccatctacaccttcactgcctccttcactaggaaggtcattcccttctttgggctctggggccgagggtccagtttctccctgagctcctgagaaggagcagttacctactctcctctaagtacaggactcatatcaacccaagtaccatgtggacttgatccctggctgaatcacctggatgacttggaatagaaatgactgctttagaagatgggatggggccgggtggtaagggatagaagagaggactctcaatctactgatcaagtcctttccccaatgcccagtggatggccagggtacctggggactcaggctgctgccagttctgctcaccaccatccgtgcttggcacagaagtagctgcatagaaagggcactggatttgaagtcagaagacctgggttcttgaaccagcctgtcaaccagttgtatgactttaaacaaggcatctcacctcttttcatcttgttttcttccaataatgttagagttcatgtaatcacattctctagaaccatttagtttgtgttaactatgaaccaagcagtgtggtggccactggtgacttgaaaatatagagaaaaaaaaaacctgctctatatctgaaagagctcttgggaagacagagaaacataaagaggaaattacagcacagtgtggtgggtgttacgggaagtccaaccccagcattatgggagttcaggggaaggggcatagcccagcctggaaggagagggtgagtgggggatggctttctgaaaagggtggtctaaaggatgcctatggtcaatagggaaaagaggggaagaagcatcttaagaagaggaaacagcagagaactggctggatgacctgtgactctggagcactgggttgtctccattgtcattatgggcagatgtgtgccatccccagccgacgccactcactgcctccttcctcctggtgttgccacttctgggtgagattaaggtgcagggcctgggggcaggaggacataaggtatagccataaatcataacccagggaccacactcaaccctagggaaattgtcttcctgatcagttgattaccatctgaggtcaagaaatgagatagtgggagcaaatgggtcacaaatagctcagctgtgggctcagaaactgctaggtaaaagaattccagaaggaggccagggcataagttggatgacctatgaactttagtctaaagaattgagactaccgtaattgagactactgtagtgacatctgagaaatgggatggaagagtgaccatgttttattttcttgttcttgtcactattgtattttattttgcataatcatgcccttcactgacagtctccttaacatcatctgtttactctgctcagtgtaaactacaatgctctgtcatctccctactgggtctcctgggaggaggggagccatccagggtgcaaactcaaaggcagagggcacagcgtgcttaggcccaagcttagaattcaattgagaagttctgttgttcatccttacctcagcaggtagaaaagaggtggagatcagaagccagggattagagattgaattgctttccctgggagtgtgcagtatctcattaaaatgttgtatattcaaaaaaatacagacacacacaagtgcctatataatgataaaacatatccaaagcacccaaacctgtgattccagaaaagtagatcctatttttgtttatttttattggctttagctgtgtcttttgaaaggactattatcctctaaaatgtatgtgtatgaagatcctggcttgcagctcgggagctttacacaccttgtgtcactttatcttggtaacgagccaagatcatgcaaccagttcatccatgtctgacccaagagctcttaactgctatgctgcactgcctcattcagagatagatgcctgcatgggtcctggcgattattttaatgctggctacacccccacaggtgacttggattcagaaatacaatttatatttcttctttttaaattgttttattttatttttcttttaatagttatatgtcagtgagaacaatttatatgtcttacactgagaaataaaactgctcataagtgaaaaaaaaaaaaaaaaaaaaaaaaaaaaaa

SEQ ID NO: 1094 - DNA, 4454 bp, Homo sapiens
gtggagatgaatggcgggcgcggcgaccgggagccggacccctgggaggtcggagcttgtcgagggatgcggctggcgctgcccggagcatggcgaccgcgtggctgagctcttctgtcgccgctgccgccgctgcgtgtgcgcgctttgcccggtgctgggcgcgcaccgtggccaccctgtgggcctggcgctggaggcagcggtgcacgtgcagaaactcagccaagaatgtttaaagcagctggcaatcaagaagcagcagcacattgacaacataacccagatagaagatgccaccgagaagctcaaggctaatgcagagtcaagtaaaacctggctgaaggggaaattcactgaactcagattactacttgacgaagaggaagcgctggccaagaaattcattgataaaaacacgcagcttaccctccaggtgtacagggaacaagctgactcttgcagagagcaacttgacatcatgaatgatctctccaacagggtctggagtatcagccaggagcccgatcctgtccagaggcttcaggcatacacggccaccgagcaggagatgcagcagcagatgagcctcggggagctgtgccatcccgtgcccctctcttttgagcccgtcaagagcttctttaagggcctcgtggaagccgtggagagtacattacagacgccattggacattcgccttaaggaaagcataaactgccagctctcagacccttccagcaccaagccaggtaccttgttgaaaaccagcccctcaccagagcgatcgctattgctgaaatacgcgcgcacgcccacgctggatcctgacacgatgcacgcgcgcctgcgcctgtccgccgatcgcctgacggtgcgctgcggcctgctgggcagcctggggcccgtgcccgtgctgcggttcgacgcgctctggcaagtgctggctcgtgactgcttcgccaccggccgccactactgggaggttgacgtgcaggaggcgggcgccggctggtgggtgggcgcggcctacgcctcccttcggcgccgcggggcctcggccgccgcccgcctgggctgcaaccgccagtcctggtgcctcaagcgctacgaccttgagtactgggccttccacgacggccagcgcagccgcctgcggccccgcgacgacctcgaccggctcggcgtcttcctggactacgaggccggcgtcctcgccttctacgacgtgacgggcggcatgagccacctgcataccttccgcgccacgttccaggagccgctctacccggccctgcggctctgggagggggccatcagcatcccccggctgccctaggggccaggaccggcgtgacagcctccaggtacgccgcagctgcccagtctcgcctaatctacctagatcagcgtggctggtccccttactgcctgcttcttagggccctctccctgccccagctttccccgaccaatcacgcctacagtgctttgaaggtttcctctcctaggctagtttcaaacaggccctaaacaagtctgctgctgccctctcatcagacctccgcaccctcaccccaccatcacttaaactactttaatccagttccttcaaagtgatacccccacaggtaagccctcagcatcctgaatacatcatccgcagcctgggaaccttctccctcgtacagcacaggaacctgacacatagtaggcacacagtaaacgtttgtgaatgaatgggagtcatccagtcctgactcttctgtctcttgaggtcccttgaatcttccgcttcctccccaccgatttcagcgtgtccacatcacagctccctccagaagctgcaagagcttcttagcagttcctggtctgaaccctctcccagtcctcatcttccaccctaaaactagagtgatcttcctaaaacttcacttaacccctcagctatgaaaaggcttccaggagtttccatgaaataacaaaaaaaaatacaagcgcctcaccttagcattcaaggcttgtctagtctgcccaaaattacttatcctcacctagctcctaccactcttcttagagactctccagtcagaaatgtgtcgcatagttccacctccacacctctctgctgccagcacattcatgcagaaaagtcttttcacctgtctcagtcttccgcaggcttacctgcgccaggaagtctaaccaaggaacaagaatctcactatcagagccacaaatctgggacctgtctttccaactaaattggaggctttggaagggcagctttgtcctatactctctccaccctgaaaagttcccagaaagccccttccctcccaagcagtgaattaataaccagcaggtgcctatcactgagtaacagaagagctgagttaggcgggcctcacaggtcacccagccagatctcatctggggagtctgaggtcctgaaagaaagcagagctgcgtaaagttaccccggggtgatataggggggccagacgtgtgccccgttcacccacccccaggcaagcatctgacctgtcccctggcccagcccttaggcccagctttcaacctgcttactcatttctcaggggattttgggaaggaatcagcaggtgacagttgctaagcaaccaaagggcgtggtgtttcccaactgtcttgggacaaaaagggtaagagcacccttagatccagatgttgccaaggaaacccagagtgcccagctgtctggaatgaagtgacagaggtagaaaacagtaggccctcacaggaggccaccttcgctagcagggagtgggaggcttctttccagggatttgtgtctccgttctgaaggttctgcgtcctgttttgtcaattccctagacggttttgaagttatattctgttaaagcatcttcataggtgcttggtgggaggccaaggtcgccgaatcctcgtggtttaaatagactttcagtgcattagtttgaaccatataaaactgacaattttcaatagtttttgagttaaaaatggcacttttgatatgagacaatgtagcagaataccaggcagacagaaccttgcaaacaccttaacttctaaccaaagactttaaaactctggctggacagagttttaagcactatgctgcaggaatcctgagaaaaaggggaaattaattctattaggaatggcccaaactgaattgtgacaggcagagggtgttcctgacagagggaagatgaatacacttgaccccaacatttctgcccatccctgatgaccaagacctcttcccagacccacagctgcaggggccaagtaataacagctcttaatagtttataatgcactgttttaatgctttacgactaaactcatctgatcctttcatcagccctagagggtagaaagttttcccaattctacacatggcaaaatggagacccagagtcacttgcccaaggtcgcacagctagtggtggagctggagtctgggcccaggctgtgagttccaggtctgtgctcatggccaccaggccatactgctcagggtgaatgcagctggtctctggccagtgcctggtgctctggcccctctcgtggagctactgcccatgatgctttcctagtgcctggttactctgcgagacttgagtctacctttggactgccttccttgggggtctgagatgaggccttatggcccagaggggaacttgattcaaaaatttgggattcatgtagcagagacagagctagactgtaaaggtcacaaactagctgtgtcaaggcccgtgatagccagaaagcggcagtttcagtccatatcaattgtgtgaccagggctagtcactttttacttctcagtgccatctataaaatggggataatagcactacctaccaagtgctgtgaggctcaaatgagccaaaggttataaacttgccttaaaactatagtcctatacaaaaattagctgggcgtggtggtgcatgcctgtaatcccagctactagggaggctgaggcaagagagttgcttgaacccaggaggcggagattgcagtgagctgagattgcaccactgcactccagcctggggacagagcaagactcttgtctcaaaaaaaacaaaaaaaacatatatactgctgtatcatgccaggatttatcagcattcccaagggagcttgcacggtactgaccgagtgctgagactactggtattcccagctgccatgtggcagcagcaggagctactagaatattctcagcacaggaatgaggcttccttggtttccatgtctgtaagggttactgatcacttaccttcttctctttcagacttgaatctgtagacatttctttattgatatggcaaattgcttgcagatatttttaaatgacagcaattttctaatatttggtttaataaaatgtgaataatgtccctttt

SEQ ID NO: 1095 - DNA, 2241 bp, Homo sapiens
actttgatgctgtgggcacgcctcagagccagaagtttatggctcccacctgctcaatctgacaggaagcttctgctccccagttctccccagccactgtggtctacagattccaggaaacccatccccctgtgacctcatggtgtgctctgttctccaccctagggaccagaaggagccaggagtaaagaactggcttacttggccgccactgggaaattctgggtaattcgagacgccctggaatttggacccactccgctgataggtggtggccagggttctagggaacacaagaggcggagccaggtggcttccctgtgctggcattcttgcctctctctctctttctctctctctgtctcttagccttgcagccgtttccctctgcgattcatgtaagtgtgactcgatttcagggaaagggaactcgcgtgggctgaggagaccggagtggacgggctggggaaggcaccgtgatgcccgcaaccccgtccctgaaggtggtccatgagctgcctgcctgtaccctctgtgcggggccgctggaggatgcggtgaccattccctgtggacacaccttctgccggctctgcctccccgcgctctcccagatgggggcccaatcctcgggcaagatcctgctctgcccgctctgccaagaggaggagcaggcagagactcccatggcccctgtgcccctgggcccgctgggagaaacttactgcgaggagcacggcgagaagatctacttcttctgcgagaacgatgccgagttcctctgtgtgttctgcagggagggtcccacgcaccaggcgcacaccgtggggttcctggacgaggccattcagccctaccgggatcgtctcaggagtcgactggaagctctgagcacggagagagatgagattgaggatgtaaagtgtcaagaagaccagaagcttcaagtgctgctgactcagatcgaaagcaagaagcatcaggtggaaacagcttttgagaggctgcagcaggagctggagcagcagcgatgtctcctgctggccaggctgagggagctggagcagcagatttggaaggagagggatgaatatatcacaaaggtctctgaggaagtcacccggcttggagcccaggtcaaggagctggaggagaagtgtcagcagccagcaagtgagcttctacaagatgtcagagtcaaccagagcaggtgtgagatgaagacttttgtgagtcctgaggccatttctcctgaccttgtcaagaagatccgtgatttccacaggaaaatactcaccctcccagagatgatgaggatgttctcagaaaacttggcgcatcatctggaaatagattcaggggtcatcactctggaccctcagaccgccagccggagcctggttctctcggaagacaggaagtcagtgaggtacacccggcagaagaagagcctgccagacagccccctgcgcttcgacggcctcccggcggttctgggcttcccgggcttctcctccgggcgccaccgctggcaggttgacctgcagctgggcgacggcggcggctgcacggtgggggtggccggggagggggtgaggaggaagggagagatgggactcagcgccgaggacggcgtctgggccgtgatcatctcgcaccagcagtgctgggccagcacctccccgggcaccgacctgccgctgagcgagatcccgcgcggcgtgagagtcgccctggactacgaggcggggcaggtgaccctccacaacgcccagacccaggagcccatcttcaccttcactgcctctttctccggcaaagtcttccctttctttgccgtctggaaaaaaggttcctgccttacgctgaaaggctgaagtggggcgcgcgaagggcggcgaagcggagacggcggctctccgggatccagctccgcccctggccagtgtgcggcccgggggctccctgtgcccgcgtgaggcgagagaacaggggacttgagtctcgaacagcggttgtttttactttatttatcttaggccctcagctccctgacgtcctgagcctccctgtgacgctctggccttctctgtacctcagagtgcagaaccacagacggcttcggctgtgcctagggcaacagccaacctaggagccagcgggctttcggggaaaaaaaagaaaaagacatctaaaataaaatgtttaaactgtttcaaaataaaaaaaaaaaaaaaaaaa

SEQ ID NO: 1096 - DNA, 2920 bp, Homo sapiens
gatttatggaaagcacctggtgcgtgttctgccctctgaggaccctgccctttcccaaaaggggtatcttaagaaggaaaatatggctgctctttgccggacagcagagtcccagtaggatttccattttccaaacctggtatcatctcctagttggaagaagtggtaagcccacgaacacaaatgcaggagggagaggtgccaagaagcagcggtacacagcaggcacagagacacgtggtcttcagcagagcctatggggttcagatgattcacataagaatagaagtttcagggctggacctggggaggcagcctgagcctgagccggctgtcctgagcctgagtactctagctgccttgtcgtcatcgcatctggctgccatccagcgccagcacacagtaatgagtggccgagcttcctctgggagggaggaaacagttaaaatcttgcagcagctgcaatcatctaggcgtggttctcttgtctgacttgggctgcacagatcctgggccaagggacagaagaaagacagcctaggagcagagcctcccagatggctgagttggatctaatggctccagggccactgcccagggccactgctcagcccccagcccctctcagcccagactctgggtcacccagcccagattctgggtcagccagcccagtggaagaagaggacgtgggctcctcggagaagcttggcagggagacggaggaacaggacagcgactctgcagagcagggggatcctgctggtgaggggaaagaggtcctgtgtgacttctgccttgatgacaccagaagagtgaaggcagtgaagtcctgtctaacctgcatggtgaattactgtgaagagcacttgcagccgcatcaggtgaacatcaaactgcaaagccacctgctgaccgagccagtgaaggaccacaactggcgatactgccctgcccaccacagcccactgtctgccttctgctgccctgatcagcagtgcatctgccaggactgttgccaggagcacagtggccacaccatagtctccctggatgcagcccgcagggacaaggaggctgaactccagtgcacccagttagacttggagcggaaactcaagttgaatgaaaatgccatctccaggctccaggctaaccaaaagtctgttctggtgtcggtgtcagaggtcaaagcggtggctgaaatgcagtttggggaactccttgctgctgtgaggaaggcccaggccaatgtgatgctcttcttagaggagaaggagcaagctgcgctgagccaggccaacggtatcaaggcccacctggagtacaggagtgccgagatggagaagagcaagcaggagctggagaggatggcggccatcagcaacactgtccagttcttggaggagtactgcaagtttaagaacactgaagacatcaccttccctagtgtttacgtagggctgaaggataaactctcgggcatccgcaaagttatcacggaatccactgtacacttaatccagttgctggagaactataagaaaaagctccaggagttttccaaggaagaggagtatgacatcagaactcaagtgtctgccgttgttcagcgcaaatattggacttccaaacctgagcccagcaccagggaacagttcctccaatatgcgtatgacatcacgtttgacccggacacagcacacaagtatctccggctgcaggaggagaaccgcaaggtcaccaacaccacgccctgggagcatccctacccggacctccccagcaggttcctgcactggcggcaggtgctgtcccagcagagtctgtacctgcacaggtactattttgaggtggagatcttcggggcaggcacctatgttggcctgacctgcaaaggcatcgaccggaaaggggaggagcgcaacagttgcatttccggaaacaacttctcctggagcctccaatggaacgggaaggagttcacggcctggtacagtgacatggagaccccactcaaagctggccctttccggaggctcggggtctatatcgacttcccgggagggatcctttccttctatggcgtagagtatgataccatgactctggttcacaagtttgcctgcaaattttcagaaccagtctatgctgccttctggctttccaagaaggaaaacgccatccggattgtagatctgggagaggaacccgagaagccagcaccgtccttggtggggactgctccctagactccaggagccatatcccagacctttgccagctacagtgatgggatttgcattttagggtgatttgggggcagaaataactgctgatggtagctggcttttgaaatcctatggggtctctgaatgaaaacattctccagctgctctcttttgctccatatggtgctgttctctatgtgtttgcagtaattcttttttttttttttgagacggagtctcgcactgttgcccaggctggagagcagtggcgcgatcttggctcactgcaagctccgcctcccgagttcaagcaattctcctgcctcagcctcccgagtagctgggattacaggtgcctgccaccacacccagctaatgttttgtatttttagtagagatggggtttcaccatgttggccaggcagatctcaaactcctgacctcgtgatgcacccacctcggcctcccaaagtgctgggattacatgcgtgagccactgcgccctgcctgtttgtagtaatttttaggcaccaaatctccctcatcttctagtgccattctcctctctgttcaggtaaatgtcacactgtgcccagaatggatgaccaggaaccttaaagagtggctgaaaagattgcagagttatcataataaattgctaacttgcgtaaaaaaaaaaaaaaaaaaaa

SEQ ID NO: 1097 - DNA, 2085 bp, Homo sapiens
accacatcctccccaccgcccagtcagcacccgctgcgcctgtccccggctcgtccagagccttccaccccctgccgccttccttccccaagccacccccaacctctcctaagaggcgccgccccagtcccggccgccgaacactccctcgcccagcattcccctcccccgccgccccccagcccccgctgacgccacaaagtccctaggcctcccgaccccaggtccccacgccccgggccgggccgcagcctcctgggcttcgtgggggcagacccagcctttcccggcagcgagcgctcggccaggtgcactaggcgctgtgcgggccccccttccccgcgagtccctcaagcgggaacctgcctcgtgtctcccaggagccatggaggctgtggaactcgccagaaaactgcaggaggaagctacgtgctccatctgtctggattacttcacagaccctgtgatgaccacctgtggccacaacttctgccgagcctgcatccagctgagctgggaaaaggcgaggggcaagaaggggaggcggaagcggaagggctccttcccctgccccgagtgcagagagatgtccccgcagaggaacctgctgcccaaccggctgctgaccaaggtggccgagatggcgcagcagcatcctggtctgcagaagcaagacctgtgccaggagcaccacgagcccctcaagcttttctgccagaaggaccagagccccatctgtgtggtgtgcagggagtcccgggagcaccggctgcacagggtgctgcccgccgaggaggcagtgcaggggtacaagttgaagctggaggaggacatggagtaccttcgggagcagatcaccaggacagggaatctgcaggccagggaggagcagagcttagccgagtggcagggcaaggtgaaggagcggagagaacgcattgtgctggagtttgagaagatgaacctctacctggtggaagaagagcagaggctcctccaggctctggagacggaagaagaggagactgccagcaggctccgggagagcgtggcctgcctggaccggcagggtcactctctggagctgctgctgctgcagctggaggagcggagcacacaggggcccctccagatgctgcaggacatgaaggaacccctgagcaggaagaacaacgtgagtgtgcagtgcccagaggttgcccccccaaccagacccaggactgtgtgcagagttcccggacagattgaagtgctaagaggctttctagaggatgtggtgcctgatgccacctccgcgtacccctacctcctcctgtatgagagccgccagaggcgctacctcggctcttcgccggagggcagtgggttctgcagcaaggaccgatttgtggcttacccctgtgctgtgggccagacggccttctcctctgggaggcactactgggaggtgggcatgaacatcaccggggacgcgttgtgggccctgggtgtgtgcagggacaacgtgagccggaaagacagggtccccaagtgccccgaaaacggcttctgggtggtgcagctgtccaaggggaccaagtacttatccaccttctctgccctaaccccggtcatgctgatggagcctcccagccacatgggcatcttcctggacttcgaagccggggaagtgtccttctacagtgtaagcgatgggtcccacctgcacacctactcccaggccaccttcccaggccccctgcagcctttcttctgcctgggggctccgaagtctggtcagatggtcatctccacagtgaccatgtgggtgaaaggatagacacagaccgggggactcgggcactgctcctggctctgcagaaggtgtgggccttctgcttactgcaggccacctgccagggttctctggcatcacgctggcagccattagacacacaggggggtttctcaaattctaaatataattgtgattagaactgtcaaacattaagagggtatactgacagatgcttcctagaggaaacttttgaaagcccctgcgttctgagtggaccgatttctaaatccatacctacacaccaggaa

SEQ ID NO: 1098 - DNA, 3015 bp, Homo sapiens
cagggtttattgttatgtaagttcttgttcagcttcctttgttttctttcacttctgagaatttaactttcgtttctcactcagctcctgtggggaaactcatttgtggagaccagccctctggcttggtgagtgaatctggtttacaccggctcctgccctgccttcactcttctcccctgattcaagactcctctgctttggactgaagcactgcaggagtttgtgaccaagaacttcaagagtcaagacagaaggaagccaagggagcagtgcaatggatttctcagtaaaggtagacatagagaaggaggtgacctgccccatctgcctggagctcctgacagaacctctgagcctagattgtggccacagcttctgccaagcctgcatcactgcaaagatcaaggagtcagtgatcatctcaagaggggaaagcagctgtcctgtgtgtcagaccagattccagcctgggaacctccgacctaatcggcatctggccaacatagttgagagagtcaaagaggtcaagatgagcccacaggaggggcagaagagagatgtctgtgagcaccatggaaaaaaactccagatcttctgtaaggaggatggaaaagtcatttgctgggtttgtgaactgtctcaggaacaccaaggtcaccaaacattccgcataaacgaggtggtcaaggaatgtcaggaaaagctgcaggtagccctgcagaggctgataaaggaggatcaagaggctgagaagctggaagatgacatcagacaagagagaaccgcctggaagaattatatccagatcgagagacagaagattctgaaagggttcaatgaaatgagagtcatcttggacaatgaggagcagagagagctgcaaaagctggaggaaggtgaggtgaatgtgctggataacctggcagcagctacagaccagctggtccagcagaggcaggatgccagcacgctcatctcagatctccagcggaggttgaggggatcgtcagtagagatgctgcaggatgtgattgacgtcatgaaaaggagtgaaagctggacattgaagaagccaaaatctgtttccaagaaactaaagagtgtattccgagtaccagatctgagtgggatgctgcaagttcttaaagagctgacagatgtccagtactactgggtggacgtgatgctgaatccaggcagtgccacttcgaatgttgctatttctgtggatcagagacaagtgaaaactgtacgcacctgcacatttaagaattcaaatccatgtgatttttctgcttttggtgtcttcggctgccaatatttctcttcggggaaatattactgggaagtagatgtgtctggaaagattgcctggatcctgggcgtacacagtaaaataagtagtctgaataaaaggaagagctctgggtttgcttttgatccaagtgtaaattattcaaaagtttactccagatatagacctcaatatggctactgggttataggattacagaatacatgtgaatataatgcttttgaggactcctcctcttctgatcccaaggttttgactctctttatggctgtgcctccctgtcgtattggggttttcctagactatgaggcaggcattgtctcatttttcaatgtcacaaaccacggagcactcatctacaagttctctggatgtcgcttttctcgacctgcttatccgtatttcaatccttggaactgcctagtccccatgactgtgtgcccaccgagctcctgagtgttctcattcctttacccacttctgcatagtagcccttgtgctgagactcagattctgcacctgagttcatctctactgagaccatctcttcctttctttccccttcttttacttagaatgtctttgtattcatttgctagggcttccatagcaaagcatcatagattgctgatttaaactgtaattgtattgccgtactgtgggctggaaatcccaaatctagattccagcagagttggttctttctgaggtctgcaaggaagggctctgttccatgcctctctccttggcttgtagaaggcatcttgtccctatgactcttcacattgtctttatgtacatctctgtgcccaagttttccctttttattaagacaccagtcatactggctcagggcccaccgctaatgccttaatgaaatcattttaacattatattctctacaaagaccttatttccaaataagataatatttggaggtattgggaataaaaactccaacatataaatttgaggaaggcacgatttcactcataacaatcttaccctttcttgcaagagatgcttgtacattattttcctaataccttggtttcactagtagtaaacattattattttttttatatttgcaaaggaaacatatctaatccttcctatagaaagaacagtattgctgtaattccttttcttttcttcctcatttcctctgccccttaaaagattgaagaaagagaaacttgtcaactcatatccacgttatctagcaaagtacataagaatctatcactaagtaatgtatccttcagaatgtgttggtttaccagtgacaccccatattcatcacaaaattaaagcaagaagtccatagtaatttatttgctaatagtggatttttaatgctcagagtttctgaggtcaaattttatcttttcacttacaagctctatgatcttaaataatttacttaatgtattttggtgtattttcctcaaattaatattggtgttcaagactatatctaattcctctgatcactttgagaaacaaacttttattaaatgtaaggcacttttctatgaattttaaatataaaaataaatattgttctgattattactgaaaagatgtcagccatttcaatgtcttgggaaacaattttttgtttttgttctgttttctttttgcttcaataaaacaatagctggctctaaaaaaaaaaaaaaaaaaaaaaaaaaa

SEQ ID NO: 1099 - DNA, 3499 bp, Homo sapiens
cgggacccggaacagaccgccgtgagagaggaggggtgccggccgggattcgcggcccggagctcgggaccggagtcaggaatggagagaagggtaatggttttacctcttattgtggaaacctgttgagatcacagagaatatactgacggcataaaagggcagaaccatagcagggtgcggttgcttcattccagcctcgcagtcacctctgtgccctgctggttgtcttcccagcgctgctgtagttgccttccatggatctataggagagcaagtcctccaggagctggtggtgtctgtcgattgactgagtgctggagctggcagccctgtgcaggctgccacctttgcccctttactgtgcttgctcctgactctatgtcgcgtctccaaggagaagaagtcctcaccagtgaacggagacctctctgaactaaggataccatggccacgtcagccccactacggagcctggaagaggaggtgacctgctccatctgtcttgattacctgcgggaccctgtgaccattgactgtggccacgtcttctgccgcagctgcaccacagacgtccgccccatctcagggagccgccccgtctgcccactctgcaagaagccttttaagaaggagaacatccgacccgtgtggcaactggccagcctggtggagaacattgagcggctgaaggtggacaagggcaggcagccgggagaggtgacccgggagcagcaggatgcaaagttgtgcgagcgacaccgagagaagctgcactactactgtgaggacgacgggaagctgctgtgcgtgatgtgccgggagtcccgggagcacaggccccacacggccgtcctcatggagaaggccgcccagccccacagggaaaaaatcctgaaccacctgagtaccctaaggagggacagagacaaaattcagggcttccaggcaaagggagaagctgatatcctggccgcgctgaagaagctccaggaccagaggcagtacattgtggctgagtttgagcagggtcatcagttcctgagggagcgggaggaacacctgctggaacagctggcgaagctggagcaggagctcacggagggcagggagaagttcaagagccggggcgtcggggagcttgcccggctggccctggtcatctccgaactggagggcaaggcgcagcagccagctgcagagctcatgcaggacacgagagacttcctaaacaggtatccacggaagaagttctgggttgggaaacccattgctcgagtggttaaaaaaaagaccggagaattctcagataaactcctctctctgcaacgaggcctgagggaattccaggggaagctgctgagagacttggaatataagacagtgagcgtcaccctggacccacagtcggccagtgggtacctgcagctgtcagaggactggaagtgcgtgacctacaccagcctgtacaagagtgcctacctgcacccccagcagtttgactgtgagcctggggtgctaggcagcaagggcttcacctggggcaaggtctactgggaagtggaagtggagagggagggctggtctgaggatgaagaagagggggatgaggaggaagagggagaagaggaggaggaggaagaggaggccggctatggggatggatatgacgactgggaaacggacgaagatgaggaatcgttgggcgatgaagaggaagaagaggaggaggaagaggaggaagttctggaaagctgcatggtgggggtggctagagactctgtgaagaggaagggagacctctccctgcggccagaggatggcgtgtgggcgctgcgcctctcctcctccggcatctgggccaacaccagccccgaggctgagcttttcccagcactgcggccccggagagtgggcatcgccctggattatgaagggggcaccgtgactttcaccaacgcagagtcacaggaactcatctacaccttcactgccaccttcacccggcgcctggtccccttcctgtggctcaagtggccaggaacacgcctcctgctaagaccctgagccctgacatctgcccccagccccaaccctcagatgcttcacttctttggaattccaggactctcaatggggggacgggatgcctggcctaagcacctggagcaggggaccccatatccactggtagccacctccccattgctgtggccccctgaaatctcactcagtgctgttgctccatctactgccctaatggggctcttttcccacctcctgctggtttcccgagggaacttctgaccctggagtccatgagggctcctttcctttttgaccacgaccttggccccagctctgcactctctggaataagggcccgatgcagcattttcttgcccagtgtggcaagacctcagaaaaaccagtcaattacgcctaagatcattttgctgtccttaaaccccccaggttccttcttgcacaaatccactctgctgcccaccttccctggcattttaaacagacctaccccaccccaactcagagttaagcatacatggcaatgctgaaaataaacaaaatccactgaggcttcccaggccatttaaagcctggagtaccagcgcatatcatctcatggggtccagagtggagtccaggcttctctgaaaccagggctgagcatatttccatagccaaggaggtgggactccctggagctatctgtggtcttagggaaggatccagacatacacggctttggggtacaagctgtgatcactgatcaataaattatctctagattggtccttgtgaggggagttttaagaatccagaacatcttgctcttgatcagcacatccaaaaacaccaagacaaacatccagtggagcagaacctctcctgcctcgggagttctgaccgggttccccagcagggtgttaagcctctgtctctggccctaccagcatccaggttccactttcctaggagagagtggagatgggaagacagggaaaggaaggcagcaggaggccacaagcccaccaggtcttcatgtcaagagagggagtaacatgtcttctcattgcccacggacccaacctctgtccaggtgcccctcatcatcacagtttaacacaagctcccctgctccagccaaattgatctcccagtcttgtccttacccattccaagtgctctgccagcccctgttcatccaagttttaagtcctccaccctgttctaagagactgttccaacggctctgggcctcagtggtcacttgaccaccattgtctcagagctgcccactttgtgtgtgtcacatgctgcctgagtcacatgtacatcttatttctgcctctagttttgtaagctcctggagggcggataacatcttatactactcttgtattctcatggcacctagtgcagtgctgggcacagagtaggtgctcaataaagacttgttgaatgaaaaaaaaaaaaa

SEQ ID NO: 1100 - DNA, 2989 bp, Homo sapiens
ggcgcgcgggcgagcggttgtgcttgtgcttgtggcgcgtggtgcgggtttcggcggcggctgaggaagaagcgcgggcggcgccttcgggaggcgagcaggcagcagttggccgtgccgtagcagcgtcccgcgcgcggcgggcagcggcccaggaggcgcgtggcggcgctcggcctcgcggcggcggcggcggcagcggcccagcagttggcggcgagcgcgtctgcgcctgcgcggcgggccccgcgcccctcctccccccctgggcgcccccggcggcgtgtgaatggcggcctccgcggcggcagcctcggcagcagcggcctcggccgcctctggcagcccgggcccgggcgagggctccgctggcggcgaaaagcgctccaccgccccttcggccgcagcctcggcctctgcctcagccgcggcgtcgtcgcccgcggggggcggcgccgaggcgctggagctgctggagcactgcggcgtgtgcagagagcgcctgcgacccgagagggagccccgcctgctgccctgtttgcactcggcctgtagtgcctgcttagggcccgcggcccccgccgccgccaacagctcgggggacggcggggcggcgggcgacggcaccgtggtggactgtcccgtgtgcaagcaacagtgcttctccaaagacatcgtggagaattatttcatgcgtgatagtggcagcaaggctgccaccgacgcccaggatgcgaaccagtgctgcactagctgtgaggataatgccccagccaccagctactgtgtggagtgctcggagcctctgtgtgagacctgtgtagaggcgcaccagcgggtgaagtacaccaaggaccatactgtgcgctctactgggccagccaagtctcgggatggtgaacgtactgtctattgcaacgtacacaagcatgaaccccttgtgctgttttgtgagagctgtgatactctcacctgccgagactgccagctcaatgcccacaaggaccaccagtaccagttcttagaggatgcagtgaggaaccagcgcaagctcctggcctcactggtgaagcgccttggggacaaacatgcaacattgcagaagagcaccaaggaggttcgcagctcaatccgccaggtgtctgacgtacagaagcgtgtgcaagtggatgtcaagatggccatcctgcagatcatgaaggagctgaataagcggggccgtgtgctggtcaatgatgcccagaaggtgactgaggggcagcaggagcgcctggagcggcagcactggaccatgaccaagatccagaagcaccaggagcacattctgcgctttgcctcttgggctctggagagtgacaacaacacagcccttttgctttctaagaagttgatctacttccagctgcaccgggccctcaagatgattgtggatcccgtggagccacatggcgagatgaagtttcagtgggacctcaatgcctggaccaagagtgccgaggcctttggcaagattgtggcagagcgtcctggcactaactcaacaggccctgcacccatggcccctccaagagccccagggcccctgagcaagcagggctctggcagcagccagcccatggaggtgcaggaaggctatggctttgggtcaggagatgatccctactcaagtgcagagccccatgtgtcaggtgtgaaacggtcccgctcaggtgagggcgaggtgagcggccttatgcgcaaggtgccacgagtgagccttgaacgcctggacctggacctcacagctgacagccagccacccgtcttcaaggtcttcccaggcagtaccactgaggactacaaccttattgttattgaacgtggcgctgccgctgcagctaccggccagccagggactgcgcctgcaggaacccctggtgccccacccctggctggcatggccattgtcaaggaggaggagacggaggctgccattggagcccctcctactgccactgagggccctgagaccaaacctgtgcttatggctcttgcggagggtcctggtgctgagggtccccgcctggcctcacctagtggcagcaccagctcagggctggaggtggtggctcctgagggtacctcagccccaggtggtggcccgggaaccctggatgacagtgccaccatttgccgtgtctgccagaagccaggcgatctggttatgtgcaaccagtgtgagttttgtttccacctggactgtcacctgccggccctgcaggatgtaccaggggaggagtggagctgctcactctgccatgtgctccctgacctgaaggaggaggatggcagcctcagcctggatggtgcagacagcactggcgtggtggccaagctctcaccagccaaccagcggaaatgtgagcgtgtactgctggccctattctgtcacgaaccctgccgccccctgcatcagctggctaccgactccaccttctccctggaccagcccggtggcaccctggatctgaccctgatccgtgcccgcctccaggagaagttgtcacctccctacagctccccacaggagtttgcccaggatgtgggccgcatgttcaagcaattcaacaagttaactgaggacaaggcagacgtgcagtccatcatcggcctgcagcgcttcttcgagacgcgcatgaacgaggccttcggtgacaccaagttctctgctgtgctggtggagcccccgccgatgagcctgcctggtgctggcctgagttcccaggagctgtctggtggccctggtgatggcccctgaggctggagcccccatggccagcccagcctggctctgttctctgtcctgtcaccccatccccactcccctggtggcctgactcccactccctggtggccccatcccccagttcctcacgatatggtttttacttctgtggatttaataaaaacttcaccagttaaaaaaaaaaaaaaaaaaaaaaaaaaaaaa

SEQ ID NO: 1101 - DNA, 3037 bp, Homo sapiens
ctcctcacaggtgtgtctctagtcctcgtggttgcctgccccactccctgccgagacgcctgccagaaaggtcacctatcctgaaccccagcaagcctgaaacagctcagccaagcaccctgcgatggaagctgcagatgcctccaggagcaacgggtcgagcccagaagccagggatgcccggagcccgtcgggccccagtggcagcctggagaatggcaccaaggctgacggcaaggatgccaagaccaccaacgggcacggcggggaggcagctgagggcaagagcctgggcagcgccctgaagccaggggaaggtaggagcgccctgttcgcgggcaatgagtggcggcgacccatcatccagtttgtcgagtccggggacgacaagaactccaactacttcagcatggactctatggaaggcaagaggtcgccgtacgcagggctccagctgggggctgccaagaagccacccgttacctttgccgaaaagggcgagctgcgcaagtccattttctcggagtcccggaagcccacggtgtccatcatggagcccggggagacccggcggaacagctacccccgggccgacacgggccttttttcacggtccaagtccggctccgaggaggtgctgtgcgactcctgcatcggcaacaagcagaaggcggtcaagtcctgcctggtgtgccaggcctccttctgcgagctgcatctcaagccccacctggagggcgccgccttccgagaccaccagctgctcgagcccatccgggactttgaggcccgcaagtgtcccgtgcatggcaagacgatggagctcttctgccagaccgaccagacctgcatctgctacctttgcatgttccaggagcacaagaatcatagcaccgtgacagtggaggaggccaaggccgagaaggagacggagctgtcattgcaaaaggagcagctgcagctcaagatcattgagattgaggatgaagctgagaagtggcagaaggagaaggaccgcatcaagagcttcaccaccaatgagaaggccatcctggagcagaacttccgggacctggtgcgggacctggagaagcaaaaggaggaagtgagggctgcgctggagcagcgggagcaggatgctgtggaccaagtgaaggtgatcatggatgctctggatgagagagccaaggtgctgcatgaggacaagcagacccgggagcagctgcatagcatcagcgactctgtgttgtttctgcaggaatttggtgcattgatgagcaattactctctccccccacccctgcccacctatcatgtcctgctggagggggagggcctgggacagtcactaggcaacttcaaggacgacctgctcaatgtatgcatgcgccacgttgagaagatgtgcaaggcggacctgagccgtaacttcattgagaggaaccacatggagaacggtggtgaccatcgctatgtgaacaactacacgaacagcttcgggggtgagtggagtgcaccggacaccatgaagagatactccatgtacctgacacccaaaggtggggtccggacatcataccagccctcgtctcctggccgcttcaccaaggagaccacccagaagaatttcaacaatctctatggcaccaaaggtaactacacctcccgggtctgggagtactcctccagcattcagaactctgacaatgacctgcccgtcgtccaaggcagctcctccttctccctgaaaggctatccctccctcatgcggagccaaagccccaaggcccagccccagacttggaaatctggcaagcagactatgctgtctcactaccggccattctacgtcaacaaaggcaacgggattgggtccaacgaagccccatgagctcctggcggaaggaacgaggcgccacacccctgctcttcctcctgaccctgctgctcttgccttctaagctactgtgcttgtctgggtgggagggagcctggtcctgcacctgccctctgcagccctctgccagcctcttgggggcagttccggcctctccgacttccccactggccacactccattcagactcctttcctgccttgtgacctcagatggtcaccatcattcctgtgctcagaggccaacccatcacaggggtgagataggttggggcctgccctaacccgccagcctcctcctctcgggctggatctgggggctagcagtgagtacccgcatggtatcagcctgcctctcccgcccacgccctgctgtctccaggcctatagacgtttctctccaaggccctatcccccaatgttgtcagcagatgcctggacagcacagccacccatctcccattcacatggcccacctcctgcttcccagaggactggccctacgtgctctctctcgtcctacctatcaatgcccagcatggcagaacctgcagcccttggccactgcagatggaaacctctcagtgtcttgacatcaccctacccaggcggtgggtctccaccacagccactttgagtctgtggtccctggagggtggcttctcctgactggcaggatgaccttagccaagatattcctctgttccctctgctgagataaagaattcccttaacatgatataatccacccatgcaaatagctactggcccagctaccatttaccatttgcctacagaatttcattcagtctacactttggcattctctctggcgatggagtgtggctgggctgaccgcaaaaggtgccttacacactgcccccaccctcagccgttgccccatcagaggctgcctcctccttctgattaccccccatgttgcatatcagggtgctcaaggattggagaggagacaaaaccaggagcagcacagtggggacatctcccgtctcaacagccccaggcctatgggggctctggaaggatgggccagcttgcaggggttggggagggagacatccagcttgggctttcccctttggaataaaccattggtctgtcaaaaaaaaaaaaaaaaaaa

SEQ ID NO: 1102 - DNA, 3059 bp, Homo sapiens
ggtccgcagccccgccccggcccctccctccggcctgtgcggctagtccggcggcggcgccggcgcggggacaggcggaggcgcgggcagggccgggcggacgggcgctggcagcagtagcagcgccgcgggcccttcagagtggccgcagtccgagctttgccctcgcatcctgttccaacgcggaaaggacccctctggttctcctgtagcctgagccctgcctggaggaccccaggcccctccctggttctgacctcctcccttctgcaattggcttcagatcctgggctgcaaacctgcagggacagatggttgcaggttggaggggcaggctgcaccccagggagaggctggtgtgagtggcgggagccatctgtgggcgccatggcaaagagggaggacagccctggcccagaggtccagccaatggacaagcagttcctggtatgcagcatctgcctggatcggtaccagtgccccaaggttcttccttgcctgcacaccttctgtgagagatgtctccaaaactatatccctgcccagagcctgacgctatcctgtccagtatgccggcagacgtccatcctcccagagcagggcgtctcggcactgcagaacaacttcttcatcagcagcctcatggaggcaatgcagcaggcacctgatggggcccacgacccggaggacccccaccccctcagtgtagtggctggccgccctctctcctgccccaaccatgaaggcaagacgatggagttttactgtgaggcctgtgagacggccatgtgtggtgagtgccgcgccggggagcatcgtgagcatggcacagtgctgctgagggatgtggtggagcagcacaaggcggccctgcagcgccagctcgaggctgtgcgtggccgattgccacagctgtccgcagcaattgccttagtcgggggcatcagccagcagctgcaggagcgcaaggcagaggccctggcccagatcagtgcagcgttcgaggacctggagcaagcactgcagcagcgcaagcaggctctggtcagcgacctggagaccatttgtggggccaaacagaaggtgttgcaaagccagctggacacactgcgccagggtcaggaacacatcggcagtagctgcagctttgcagagcaggcactgcgcctgggctcggccccggaggtgttgctggtgcgcaagcacatgcgagagcggctggctgcattggcggcacaggccttcccggagcggccacatgagaatgcacagctggaactggtccttgaggtggacggtctgcggcgatcggtgctcaatctgggcgcactgctcaccacgagcgccactgcacacgaaacggtggccacgggagagggcctgcgccaggcgctagtgggccagcctgcctcgctcactgtcactaccaaagacaaggacgggcggttggtgcgcacaggcagcgctgagctgcgtgcagagatcaccggcccggacggcacgcgccttccggtgccagtggtggaccacaagaatggcacatatgagctagtgtacacagcgcgcacggaaggcgagctgctcctctcggtgctgctctacggacagccagtgcgcggcagccccttccgcgtgcgtgccctgcgtccgggggacctgccaccttccccggacgatgtgaagcgccgtgtcaagtcccctggcggccccggcagccatgtgcgccagaaggcagtgcgtaggcccagctccatgtacagcacaggcggcaaacgaaaggacaacccaattgaggatgagctcgtcttccgtgttggcagtcgtggaagggagaaaggtgaattcaccaatttacaaggtgtgtccgcagccagcagcggccgcatcgtggtagcagacagcaacaaccagtgtattcaggttttctccaatgagggccagttcaagttccgttttggggtccgaggacgctcacctgggcagctgcagcgccccacaggtgtggcagtggacaccaatggagacataattgtggcagactatgacaaccgttgggtcagcatcttctcccctgagggcaagttcaagaccaagattggagctggccgcctcatgggccccaagggagtggccgtagaccggaatggacatatcattgtggtcgacaacaagtcttgctgcgtctttaccttccagcccaatggcaaactggttggccgttttgggggccgtggggccactgaccgccactttgcagggccccattttgtggctgtgaacaacaagaatgaaattgtagtaacggacttccataaccattcagtgaaggtgtacagtgccgatggagagttcctcttcaagtttggctcccatggcgagggcaatgggcagttcaatgcccccacaggagtagctgtggactccaatggaaacatcattgtggctgactggggcaacagccgcatccaggtattcgacagctctggctccttcctgtcctatatcaacacatctgcagaaccactgtatggtccacagggcctggcactgacctcggatggccatgtggtggtggctgatgctggcaaccactgctttaaagcctatcgctacctccagtagctgtacagaggccctgcctggcttgtggagggacagacattggggtgattggacaagagggtctggctgggaggtgggccagacctggcagcactgaatgtgggctgtgggcatgggtgcacccggtgccctccctctcctacccccacccccacggttgcactttatttattcggttcttgctttggtgactgggtgagcctggactgtggtcccaaggatgtgtgcagagcttcaccctacccttcttacacacctccccacccctgtcagtctgctccccatcccccagcctggggccagaacagcctaccccaggacaggagtccctctagttgtctccctaccaccctatacacactgacagagacagcaataccccaccccccatattaaataaatgtcttcaccaagaaaaaaaaaaaaaaaaaaaaaaa

SEQ ID NO: 1103 - DNA, 2049 bp, Homo sapiens
atccatttgttctcaagaggtagcaagaaacagtatccacagtggactccggggctcctacagacttggcacagcttcctacagtcttgaaacagccctgttgttctgtcatggccagtgggcagtttgtgaacaaactgcaagaggaagtgatctgccccatctgcctggacattctgcagaaacctgtcaccatcgactgtgggcacaatttctgcctcaaatgcatcactcagattggggaaacatcatgtggatttttcaaatgtcccctctgcaaaacttccgtaaggaagaacgcaatcaggttcaactcgctgttgcggaatctggtggagaaaatccaagctctacaagcctctgaggtgcagtccaaaaggaaagaggctacatgcccgaggcaccaggagatgttccactatttctgcgaggatgatgggaagttcctctgttttgtgtgtcgtgaatccaaggaccacaaatcccataatgtcagcttgatcgaagaagctgcccagaattatcaggggcagattcaagagcagatccaagtcttgcagcaaaaggagaaggagacagtacaagtgaaggcacaaggtgtacacagggtcgatgtcttcacggaccaggtagaacatgagaagcaaaggatcctcacagaatttgaactcctgcatcaagtcctagaggaggagaagaatttcctgctatcacggatttactggctgggtcatgagggaacggaagcggggaaacactatgttgcctccactgagccacagttgaacgatctcaagaagctcgttgattccctgaagaccaagcagaacatgccacccaggcagctgctggaggatatcaaagtcgtcttgtgcagaagtgaagagtttcagtttctcaacccaacccctgttcctctggaactggagaaaaaactcagtgaagcaaaatcaagacatgactccatcacagggagcctaaaaaaattcaaagaccaactccaggctgataggaaaaaagatgaaaacagattcttcaaaagcatgaataaaaatgacatgaagagctggggcttgttacagaaaaataatcataaaatgaacaaaacctcagagcccgggtcatcttctgcaggcggcagaactacatcggggccaccaaatcaccactcttcagccccatcccactccctgtttcgggcctcgtctgctgggaaagtcacttttccagtatgtctcctggcctcttatgatgagatttctggtcaaggagcgagctctcaggatacgaagacatttgacgttgcgctgtccgaggagctccatgcggcactgagtgagtggctgacagcgatccgggcttggttttgtgaggttccttcaagctaagccagctcagagaacacggggagcggtggtgctacacggacttcggagcatagagtggcgctgagtgagtggctgagaccgaccacggttcttgacttagtggaattgggtcgaaggagtggagaatgggagggctcgggctactgagagtggagatgggggcgggggtggtggtgaagagagttggagaaggaatggacgaattcttgagcaaaaggaggggaagagacaatctccagccacccgccccacgcttgacttcttatcactttggctgtggtgccgcctagtggaaaaaggaagtccctgcagcagtccccgcactctttaagcagctgtttaccgaaggcaccagttcagccaggagtgaaatccggagaggagcaacgccagcctgggtcacagtccatcaaaccccatgagcccgaccactctcgctcttccttacattcccacgtcccccttctctcccaacccctcatatcagcaagggaaattaattaatgagatttgataaatcagtagatagaatgaggtccccattctgaaatatttagcagactggaaccaccacgcaagcctctgtagggggtggatggagacacttctaactttaataaactgcgactgaacgtggaaaaaaaaaaaaaaaaaaaaaaaa

SEQ ID NO: 1104 - DNA, 8339 bp, Homo sapiens
ctgcggctggggctgggggcggcggcggcggcgacgcgggcggcgggcggcgcggggcggtccggcgggttcaaagaggaaaacatggcggaaaacaaaggcggcggcgaggctgagagcggcggcgggggcagcggcagcgcgccggtaactgccggggccgccgggcccgccgcgcaggaggcggagccgcctctcaccgcggtgctggtggaggaggaggaggaggaaggcggcagggccggcgctgagggcggcgcggccgggcccgacgacgggggggtggccgcggcctcctcgggctcggcccaggctgcttcatctcctgcggcctcagtgggcactggagttgccgggggcgcagtatcgacgccggctccagctccagcctcggctcccgctccgggtccctcggcagggccgcctcctggaccgccagcctcgctcctggacacctgcgccgtgtgtcagcagagcttgcagagccggcgtgaggcggagcccaagctgctgccctgtcttcactccttctgcctgcgctgcctgcccgagccggagcgccagctcagcgtgcccatcccggggggcagcaacggcgacatccagcaagttggtgtaatacggtgcccagtatgccgccaagaatgcagacagatagaccttgtggataattattttgtgaaagacacatctgaagctcctagcagttctgatgaaaaatcagaacaggtatgtactagttgtgaagacaatgcaagtgcagttggcttttgtgtagaatgtggagagtggctatgtaagacatgtatcgaagcacatcaaagagtaaaatttactaaagatcacttgatcaggaagaaagaagatgtctcagagtctgttggagcatctggtcaacgccctgttttctgccctgtacacaaacaagaacagttgaaacttttctgtgaaacatgtgatagattgacatgtagagactgtcagctattggaacacaaagaacataggtatcagtttttggaagaagcttttcaaaatcagaagggtgcaattgagaatctactggcgaaacttcttgagaagaagaattatgttcattttgcagctactcaggtgcagaataggataaaagaagtaaatgagactaacaaacgagtagaacaggaaattaaagtggccattttcacccttatcaatgaaattaataagaaaggaaaatctctcttacaacagctagagaatgttacaaaggaaagacagatgaagttactacagcagcagaatgacatcacaggcctttcccggcaggtgaagcatgttatgaacttcacaaattgggcaattgcaagtggcagcagcacagcactactatacagcaagcgactgattactttccagttgcgtcatattttgaaagcacggtgtgatcctgtccctgctgctaatggagcaatacgtttccattgtgatcccaccttctgggcaaagaatgtagtcaatttaggtaatctagtaatagagagtaaaccagctcctggttatactcctaatgttgtagttgggcaagttcctccagggacaaaccacattagtaaaacccctggacagattaacttagcacagcttcgactccagcacatgcaacaacaagtatatgcacagaaacatcagcagttgcaacagatgaggatgcagcaaccaccagcacctgtaccaactacaacaacaacaacacaacagcatcctagacaagcagcccctcagatgttacaacaacagcctcctcgattgatcagtgtgcaaacaatgcaaagaggcaacatgaactgtggagcttttcaagcccatcagatgagactggctcagaatgctgccagaataccagggatacccaggcacagcggccctcaatattccatgatgcagccacacctccaaagacaacactcaaacccagggcatgctggaccctttcccgtagtatcggtacacaacaccacaatcaacccaacgagccctactacagcaactatggcaaatgcaaaccgaggtcccaccagcccatctgttacagcaatagagctaatcccctcagttaccaatccagaaaaccttccatcgctgccagatattccacccatacagttggaagatgctggctcaagtagtttagataatctactaagtagatacatctcaggcagtcacctacccccacagcctacaagcaccatgaatccttctccaggtccctctgccctttctccgggatcatcaggtttatccaattctcacacacctgtgagacccccaagtacttctagtactggcagtcgaggcagctgtgggtcatcaggaagaactgctgagaagacaagtcttagtttcaaatctgatcaggtgaaggtcaagcaagaacctgggactgaagatgaaatatgtagcttttcaggaggtgtaaaacaagaaaaaacagaggatggcaggaggagtgcttgcatgttgagcagtcctgagagtagcttgacaccacctctctcaaccaacctgcatctagaaagtgaattggatgcattggcaagcctggaaaaccatgtgaaaattgaacctgcagatatgaatgaaagctgcaaacagtcagggctcagcagccttgttaatggaaagtccccaattcgaagcctcatgcacaggtcggcaaggattggaggagatggcaacaataaagatgatgacccaaatgaagactggtgtgctgtctgccaaaacggaggagatctcttgtgctgcgaaaaatgtccaaaggtctttcatctaacttgtcatgttccaacactacttagctttccaagtggggactggatatgcacattttgtagagatattggaaagccagaagttgaatatgattgtgataatttgcaacatagtaagaaggggaaaactgcgcaggggttaagccccgtggaccaaaggaaatgtgaacgtcttctgctttacctctattgccatgaattaagtattgaattccaggagcctgttcctgcttcgataccaaactactataaaattataaagaaaccaatggatttatccaccgtgaaaaagaagcttcagaaaaaacattcccaacactaccaaatcccggatgactttgtggccgatgtccgtttgatcttcaagaactgtgaaaggtttaatgaaatgatgaaagttgttcaagtttatgcagacacacaagagattaatttgaaggctgattcagaagtagctcaggcagggaaagcagttgcattgtactttgaagataaactcacagagatctactcagacaggaccttcgcacctttgccagagtttgagcaggaagaggatgatggtgaggtaactgaggactctgatgaagactttatacagccccgcagaaaacgcctaaagtcagatgagagaccagtacatataaagtaaaatgacatggatttaaatcaattgtttaaaaaaaaaaaaacgaaaaaaaaaaaaaaaacacaaaaaacccagaaaacttttaagtgttgctggaatatcctgcctacagtgggcacctccttgaagaagctgatagcttttacacagtattagattgaaataatggacagaaacacattcttgtcaagaaagggggagagaagtctgtttgcaagtttcaaagcaaaaagcaaaagtgaaatgatttgaggatttctgttctaatggagatgattctctgattgttagaaatggcaaatattgatgattgtgtgctattgattggtgcaggatacttggtatacgagtaaatacttgagactcgtgtcacttgataaattttctttttggactaggtcgcacagttattaaaacaacttttaaccctcccccttcacacacatacatatcaggttgttttctagttaaaaacccaagtagctcagattctactttaatgtcagtgcagatttgcattgaatcatgccattatgttttttctcatttttatgctgttgggtcttagtttttaaattgatataaagaactcagcaatggttttattttctactcatacttagggtttaggaaacactaccactagttatcatttaatcaacttcaatggtctactgaaacaaaaatggtaacttttcattagtggattatttagagttatagtagttgtttccagaaaacacttcctcacaattgtacttcccaatcaaatcatgtgatcatacagttattcccatgaaaggcagaatgtttgtttcaaaattaatctagttttctgtacatttaaatttgagaaggtgacaactggctcttttccagtcttccttcatgtcagttttctgatagaccactattggcaaacagtatctgtcaactaccaaatgtgtaaaattttctgtatttcactttgtcttatttgtaaatagtgaactaaaacttttggcagatcagcaacatttgctgagcctgttttttaagctaatgtgtattcttactaatgttcctatcaagaatggatttgtaatatatgctgtctatttctaatgttcacattcatattttgaggttctatcttattttaatagagaacagacttctcaaaaaatcttcagaagcagcttattattgaaatatcgaaatattgaaataaacccggtggggttagattactcatctgtccaccaagtgggacatttgcatggactgggggcttaaaggacttagaagagacctgtaagtaaatcctgaaaatgagccaatccccacttgaatggttactggagtaaacccacctttaccaccccaattacagcacccgaggccgataaaccaacttggctctggttcatttttcttttcttcatttgtgatgctcagattcaaaatgtgtgttctacactgttacaggcttctcttttgtttgattaaagattttagtcctacttttgtatggacacattagaatattcagagaccaaaatagaagaatttgctgttagatatttttcagaagtcagcagatttgtggcaaatcatttatttgcctttttaaaaattcatttaagcagttcagagagtagactactcagaaaattatttcacgtaattgtctaagaggtcaatattttttaatgcatattgaatcaaataaagtgctctaaagaaattattatacaaattcctttgggttgtttttcttttcttaacaaggggtgggggtaaacaggaatatgattcaggctttctggttgtgtatttaaagagtattgattttattattactattgatttactttattcctggcttccttttcacttttctttcaatttttaaaaaataatttaagccgttgaaaatataccaaactgttgaaacattttactcaaattttaaattcctaaaaatgttttttaataagagggagaaaattatttaaaaatacttatgcctatgccaatttccctcttttttcacaaaatccatgatttcagtttgtaagtagacatatatctaagggcacatttttggaaagtgaggaatagcagcagtataacttcattttgtcaggcctttgagttctaatattttgtattgctcttcaaatggatccttttaaaaaaattgtagataatgagtcataaatagattctgccaactgaggggagaaacattttaagtaaatatttttcagtatttggggccttaaaaaataattgtgtttccttaaaattacatgttagatagagtttttaggtttttttggttttaagattggttaaagcaatttaaaagccacttttttgtcaacatttaatagcctccacttctgttaagataatgtatactgctgaggaattactattaatagctatcaacataccaccattaaattaaggtattcactttagattttttattaaagcttttttcttgcacactgatcgttgtgtttctaagctgattttttcagctctaatatacctatggttaaaaagtataaaaacttaaattgatatttagatatatgttttcctattagtttatgttttaaaaagacaaaattgtatctgtcagtccctgaaggcagtttgtttttatactctctcacatttgtatttgttttttaaatggcagtattttagaagatttggagaaaagtccacataataatgttttcttaaaagcttttaaagtttttgctgtacttcaatttacttcttccatcagaaaactaagaacaaagtgttgctcagtctgttccgctgacctaaatttgtgttttcagcacttggctcagccaattcactgagtgaaggaattgctttatgaggcaaagcatgtgaaagttctaaagtatggttagattgtaggtcgtgctctatatggaaacatcaaaccattactacagagaaatgataaggcattggatccactattgaaattattatttttggatcaacaagttggtactttctgacttctgtatcttaacataagggaattttaggtaatgctaagtcagttgtctcattttttgtgataagttttggaatttttagttaattgaaataaataatgcttttaaatagaagtaaaaggtttataagtgtgcaaattgtagatttatcaattacctcagcaggtatcctgccatgtaattattagtgattagtgttaataagataatagattcaggtcttccaactatgcccttggattgtggcctactgtatgttattaaatggtctcttactatccaaaatgggagtagatgctgtggccccgtctcccttggcttttacgtcccatatccacccccattcatgtacaacatgtgaaatataaaaatctcatttcttgtcaaaatcagcactgcttatttgcatactcagcatcggatcagtgagtagttttataaaaaatccacgcacccaactcccttagttaaaacagattcttaattcataccatgaattcttaatttctgtaccatctatgttaatgatctgctgaaggtgactcaagattttcaaggtgtaatacagtttgatcatgtaccggacctggatatttaattttttttccctcacagttaatctcctccttgataaagcaataacactgctttgagtctgttgcctaatagcatgtcagaatcctctcctggatggtgattttataggaaagtttgtatgcatatcacccagtctatcttttaaaaattaagaaatttaaatgtatgctggaagtaatgacactatattgtggcattttattttaaaaattggggaaagttgcatatttttttaaaagtaagtgtttgagtaaaaaaattgaaggtacttttttaaggaaaaaaatttatatgccacagtttacatagacatttcagattcaacacgtactcttgaatataatggtttcttttacttggtcaaaatgcatgtatagcatttctttcatcttagttccttgtgtttgcctatgtggtcctttatatattttttattgtatcgaagaaacaaaactatcttcaaaaataagttaatttggatatatttgtcatatcaaactacaaagtgtacaaagttaagtttagcccttttctagaaagtgatctttaaaattaaaaatgctcctcttttaaattcaccaaatttatgtgtgggaaggcaccaaaatgattttgtaagtgccactgcaatattccctttcaagtgtggcctaaatttcaatcttaaggatggaatgcatgtctgctccttgttctgaaaaatgtaggcatctactacattttaaaacacagtgaaacatatacataagcctataaaaaaagatttgtgcaatttgaaagcctgttaattttttatgtagacatacctacacacgaaagggttaaattcacagccttactagttccttgcttccagtatttcaattggtctcctcccctcattattattattactactagtactattatttttgcacatagttaactgcccttcaatatgattcttaaaaagtgctgtttctgtggtatcgtattctctaaataatcatatttaattttttaaaacaaggttgcagtttctaattgtttcgttcctgtgtttttgctggtgtgtaataaaagcaagttttttcttttcatggttatttaatacattagctgcctgtaaataattcttgttataatgctctggaatgtgttgtagaagttgtattagattagttttaaacccttgtttgaaagccacattgttttggttatttctattaaattagaaaattgaaaaagttttcaaatgaa

SEQ ID NO: 1105 - DNA, 2302 bp, Homo sapiens
accctggcttttcttcacctcttcaaccaggagccgagatttctgttgctctgaagccatccaggggtctttaaccagaagagagaggagagcctcaggagttaggaccagaagaagccagggaagcagtgcaatggcttcaaaaatcttgcttaacgtacaagaggaggtgacctgtcccatctgcctggagctgttgacagaacccttgagtctagactgtggccacagcctctgccgagcctgcatcactgtgagcaacaaggaggcagtgaccagcatgggaggaaaaagcagctgtcctgtgtgtggtatcagttactcatttgaacatctacaggctaatcagcatctggccaacatagtggagagactcaaggaggtcaagttgagcccagacaatgggaagaagagagatctctgtgatcatcatggagagaaactcctactcttctgtaaggaggataggaaagtcatttgctggctttgtgagcggtctcaggagcaccgtggtcaccacacagtcctcacggaggaagtattcaaggaatgtcaggagaaactccaggcagtcctcaagaggctgaagaaggaagaggaggaagctgagaagctggaagctgacatcagagaagagaaaacttcctggaagtatcaggtacaaactgagagacaaaggatacaaacagaatttgatcagcttagaagcatcctaaataatgaggagcagagagagctgcaaagattggaagaagaagaaaagaagacgctggataagtttgcagaggctgaggatgagctagttcagcagaagcagttggtgagagagctcatctcagatgtggagtgtcggagtcagtggtcaacaatggagctgctgcaggacatgagtggaatcatgaaatggagtgagatctggaggctgaaaaagccaaaaatggtttccaagaaactgaagactgtattccatgctccagatctgagtaggatgctgcaaatgtttagagaactgacagctgtccggtgctactgggtggatgtcacactgaattcagtcaacctaaatttgaatcttgtcctttcagaagatcagagacaagtgatatctgtgccaatttggccttttcagtgttataattatggtgtcttgggatcccaatatttctcctctgggaaacattactgggaagtggacgtgtccaagaaaactgcctggatcctgggggtatactgtagaacatattcccgccatatgaagtatgttgttagaagatgtgcaaatcgtcaaaatctttacaccaaatacagacctctatttggctactgggttatagggttacagaataaatgtaagtatggtgtctttgaagagtctttgtcctctgatcccgaggttttgactctctccatggctgtgcctccctgccgtgttggggttttcctcgactatgaagcaggcattgtctcatttttcaatgtcacaagccatggctccctcatttacaagttctctaaatgttgcttttctcagcctgtttatccatatttcaatccttggaactgtccagctcccatgactctatgcccaccaagctcttgaattttctcatttcttcacctacaaccctttgtcttgacttatctcctgcaactgactcatctgcaacattcacaccattgcttccttgtggtttcccttctttagaacttttactcatccttgagatgtatggtgtatttggcttgagttatgagagatgcttatttattcatttactctttttcatattttcagagaaagttacctaatccctcctaaagacacagcagtatgggtataacatccttgccttcccatttatccatgtttcactttatcactgatatgaagaggcccaaagcctgttagccaccatccatgctacctaggtagtccataggaaccacccccatgaccaccaccaacatcaactaaaggttcttggagggtatgtcagtgtgttgctcaggataccccaggtacatcaaggaatcaaggagaggaaaatatgagcaatatgtgtattcagagtgaagattttatgtccagagtatttgagctcaaaccttgcctgttgttttctaatcatgatgaatactttctcagtttctttttcctgaaatataaattgggatttaagactgtacctaactattaagatcactgtgtaaaactaagtgtctctaaatgtaatgcatcgatttagtgtctggaacataataaatatttgctctcatgattgctaaaaaaaaaaaaaaaaaa

SEQ ID NO: 1106 - DNA, 4227 bp, Homo sapiens
ctcgggtcgcgggcgttggcagccgggcgggtgggaggggccggagcaaaagttccgggcgcccgagccggctgctcgtgccatggagcggagtcccgacgtgtcccccgggccttcccgctccttcaaggaggagttgctctgcgccgtctgctacgaccccttccgcgacgcagtcactctgcgctgcggccacaacttctgccgcgggtgcgtgagccgctgctgggaggtgcaggtgtcgcccacctgcccagtgtgcaaagaccgcgcgtcacccgccgacctgcgcaccaaccacaccctcaacaacctggtggagaagctgctgcgcgaggaggccgagggcgcgcgctggaccagctaccgcttctcgcgtgtctgccgcctgcaccgcggacagctcagcctcttctgcctcgaggacaaggagctgctgtgctgctcctgccaggccgacccccgacaccaggggcaccgcgtgcagccggtgaaggacactgcccacgactttcgggccaagtgcaggaacatggagcatgcactgcgggagaaggccaaggccttctgggccatgcggcgctcctatgaggccatcgccaagcacaatcaggtggaggctgcatggctggaaggccggatccggcaggagtttgataagcttcgcgagttcttgagagtggaggagcaggccattctggatgccatggccgaggagacaaggcagaagcaacttctggccgacgagaagatgaagcagctcacagaggagacggaggtgctggcacatgagatcgagcggctgcagatggagatgaaggaggacgacgtttcttttctcatgaaacacaagagccgaaaacgccgactcttctgcaccatggagccagagccagtccagcccggcatgcttatcgatgtctgcaagtacctgggctccctgcagtaccgcgtctggaagaagatgcttgcatctgtggaatctgtacccttcagctttgaccccaacaccgcagctggctggctctccgtgtctgacgacctcaccagcgtcaccaaccatggctaccgcgtgcaggtggagaacccggaacgcttctcctcggcgccctgcctgctgggctcccgtgtcttctcacagggctcgcacgcctgggaggtggcccttggggggctgcagagctggagggtgggcgtggtacgtgtgcgccaggactcgggcgctgagggccactcacacagctgctaccacgacacacgctcgggcttctggtatgtctgccgcacgcagggcgtggagggggaccactgcgtgacctcggacccagccacgtcgcccctggtcctggccatcccacgccgcctgcgtgtggagctggagtgtgaggagggcgagctgtctttctatgacgcggagcgccactgccacctgtacaccttccacgcccgctttggggaggttcgcccctacttctacctggggggtgcacggggcgccgggcctccagagcctttgcgcatctgccccttgcacatcagtgtcaaggaagaactggatggctgagctggcccggggctgccccggtcttgtgccacagcactgttttctttctgccctcttcctaatgcccacactgcttgggcactattgcgcccctgcctccttgccaggctcttcctcctgtcctgcctggtccttttccatgactccaggctgtgcctctctccatgtttggtcccttctgtgcccatggtcaggagctattcgggtggcacctcgctggccaggctctcccgagtcgtggcacctccacaatgtgaattttctgaatccctattccaggatttctgggaataatgtttacttctagaatgggcctgttgtaaaccatctcatcgaggtgtggtaaagccattggatgaggaggggactgccatggaaaggagagtttgttacttacggttctgagaggaggggccacataggaaagccccacggtgggtcagaaggcggaaggagggaggggaacgtgtgggcaagagacttcctctggtttcctcaggaggaaatgggcaaggcagagtaagcaggggagacaggtttaagggtagctggcttgagtaatttcagtggctctcaggataggggctgccctttttgtctgatacctggccccgggatagtcaggacaggtgaatgttggcctggggtgtgacagccctgggagagccatgtgaaggaggcagctggcgccatcgctccggattagttggtttccataggaaaggcatgctttcagccagatgcttgccatctctagggattgggggattggctagcctgggaggatcagtctgtccaggtcagcgaggccccagataccagagcatcaagagtacaggaaatacagttaatgcagggcctctgtgtggctggatcctccgtctccatcagatcagctctgattgatctattcttgcacgatttcctctgaacacagggttccagagtacttaaacacaacattttttaaatcgtgatttcggcctatttccttgccaggcctgtttccccaccaggaaatgagataggaggactggatgaggatgtcctgttatagttgctgtggaggaagttcctctggttaattctcatcagcgtctgcagaaaagaaggaaagagggcacccttttcagttgggaagaaaggagaggggtggcgccatggacgtggccctaaacgctgtgggagagggaagaggaggctgggcctcgctgccctcttgtctctgctgacttcagcctggtcatgcttgctctgccacttgcgatttcatccctaatttcttcctccaccatgcctgcagacttttccctgggcttgttttttctcgcacatctctgaagagtttttaatcttcagctcatcatgtcccaggaagtggcatcataaaaggaaatatttttttttcctaggagcagtgttaaaatctgggtcacattcctgaccaaggacagcatcctgccttctgcccatccccttcagttcacaaaagctgacattttaaacaaatcatgactcacacgtattaattggttataaatatgttgtgtacactggttagataaaacttaaggccacaaggagggcccaggtaggcgatgtcagtgtgtgaaggggctggattgggcgtggtgaggatgttggcaaaccagtgcatgcacctggttggaagatgctcagcctcacaaaagctccaagccctttgggagccaaagtgtctgagagtgtgaccctctcctgtaaagtatttatcccacccattaatataatttctgtataataaacttgacctgaaattatttcattctttatattaaacttttaaaaatgttttttattttcaccttagatatgggaagagttttttttttttttttttttttaacaggataacttgagcaggctaggcctcttaaaaaaaaatttgagctaaaactcatttttcttttggcattttcttttcaatgttcttataagcaaagttcatccatgttgtagcatgtgttcaactttattttttcatcgggtaatattccattgtatggaatggtagtactacattttatttatcatgcatcgattggtggacatttggatcgtttctacttcttgactattatacataatgctgctaggaacttttgtgtatgagtttttgtgtggacatatgttttcatttctctttggtatatgcctgggagcagatttgctggatcatatgaaactctatttaacccttgagggactcccaaactgttttccaatgtggtgacacaattttatatcccatcaacagggcatgagggttctgatgactccacatccctcagtgctttttattatctatcttttaacttagccatcctagtaggggtaatgtggcatctcattgtgattttggtttgcatttccctgatggcgaatgatattgagcatcttttcatgagcttattggccatttgcatatcttcttaggacagctatctttagatcacttgctcattttttaattgggttatttgtctttttattattgagttgtaagagtccttttatagcctggcacaagtccctttaactggtatatgattataaaatttttctccgtgagctgtttcatttccttgatgatgtcctttgaaatactaaagcttttaattttg

SEQ ID NO: 1107 - DNA, 3286 bp, Homo sapiens
tagcagcgaatatactttacaccaaatctcagaagattcagaacttagatgagtggggcccaggacaggaaccctggagccttggaaggaggggagccccatctccccagaagagcagtgaccccagcagagaggggcctggtgtatcactggaggaaatagcctgccaaggaatacacgtcttcagaagaaattctgtgtggcttcaagagactgatcaaattgtgagaggaaaacagcctacccggtcctcttttcttcaatacaaaatgagataataggggttggaaggaaaaccttcaagacctatggaagtcagttgcagccagctcatcacatagaggtgcaggtgaggtgtattttcatcacggtggaaaattctggctgcttcatctccatctctagagccaatattggagcttttcaataaaagctatggcctcaaccaccagcaccaagaagatgatggaggaagccacctgctccatctgcctgagcctgatgacgaacccagtaagcatcaactgtggacacagctactgccacttgtgtataacagacttctttaaaaacccaagccaaaagcaactgaggcaggagacattctgctgtccccagtgtcgggctccatttcatatggatagcctccgacccaacaagcagctgggaagcctcattgaagccctcaaagagacggatcaagaaatgtcatgtgaggaacacggagagcagttccacctgttctgcgaagacgaggggcagctcatctgctggcgctgtgagcgggcaccacagcacaaagggcacaccacagctcttgttgaagacgtatgccagggctacaaggaaaagctccagaaagctgtgacaaaactgaagcaacttgaagacagatgtacggagcagaagctgtccacagcaatgcgaataactaaatggaaagagaaggtacagattcagagacaaaaaatccggtctgactttaagaatctccagtgtttcctacatgaggaagagaagtcttatctctggaggctggagaaagaagaacaacagactctgagtagactgagggactatgaggctggtctggggctgaagagcaatgaactcaagagccacatcctggaactggaggaaaaatgtcagggctcagcccagaaattgctgcagaatgtgaatgacactttgagcaggagttgggctgtgaagctggaaacatcagaggctgtctccttggaacttcatactatgtgcaatgtttccaagctttacttcgatgtgaagaaaatgttaaggagtcatcaagttagtgtgactctggatccagatacagctcatcacgaactaattctctctgaggatcggagacaagtgactcgtggatacacccaggagaatcaggacacatcttccaggagatttactgccttcccctgtgtcttgggttgtgaaggcttcacctcaggaagacgttactttgaagtggatgttggcgaaggaaccggatgggatttaggagtttgtatggaaaatgtgcagaggggcactggcatgaagcaagagcctcagtctggattctggaccctcaggctgtgcaaaaagaaaggctatgtagcacttacttctcccccaacttcccttcatctgcatgagcagcccctgcttgtgggaatttttctggactatgaggccggagttgtatccttttataacgggaatactggctgccacatctttactttcccgaaggcttccttctctgatactctccggccctatttccaggtttatcaatattctcctttgtttctgcctcccccaggtgactaaggaaaagagcagaagctccttggtttaaccagcacagagaaaataatataaatcccataagggcagacgtttggtctgttttcttcgctgtcatttccttagtagttagactagtgctgagattttagtggatatataattgatttatgttgaatatatggacttagcaactaaaaataccacagatggttaacctggactggggcaaagcaagataatagtgatgatcgtatgttgctgtctccatccgtctttaatgggtcagggctttgatttccaagggtcttcaggtgatgagtaggggtacccacaagtcagaaggtctgcgttctcctagtttgtttgctgccatttgaactcatgtagggaatgaaagaaagctgcaattatccgccaactgcatttaaaacaaaacaaaacagaaaaatcaaaataacattgactcttccaaccactgacatgttgtttaataatctaagcggcagtcctggaggctaccagacttactgagttctacctgagaaacagccaagcaaagtgtgagagaagggttaagactggcttacaatgagatgcttcaaatgaaaagggaattatgagtaaaattgaactttgatgggggattcagttctggaaaagaatttggtattttccagtctgctaggaccaattaccttgaaatattttaaaatctcagtaaatagttattgctgaaatggctgttggcagttcttattatgattcagagaagagcaaatagaccttaacttcattttgaaaaagaccaaattaccatacccgagtgagtaatgacaggactacaactaaaacataaacaacattaatgatgaccataaaaagtcacaaaattgctaaatgttataatttagagttgacataaaaattgatggccaggcatggtggctcacgcctgtaatcccagaactatgtgaggctgaggcaggtggatcacttgaggtcaggagttcaacaccagcctggccaacatggtgaaaccctgtctctactaaaaatacaaaaattagccgggcatggtggtaggggcctgtaacccagctactcgtgaggccaaggcaggagaattgcttgagcctgcagcagctgcagtaagccaagatcatgctgtgcctcaaggaaaaaaaaaattaatgtttactgatatttgttgaagtcctacaacatcacctctgagaataggagaaatgaagcaacagttgtgtctagatgtcagaggcatggctgggcctccatctctgcctaagggagatataaaagagttcaaactattgcccatgttccccagggtcagaagttctaattatgatgatagaggctgggttgtaagtagtaagtgaagggtagcagaatatgccatctttggcataagaagtattttgagttgaagacaattgagaaaaaaaaaaaaaaaaaa

SEQ ID NO: 1108 - DNA, 3354 bp, Homo sapiens
cccagcttccactgacacgagcctcggcgcggcttccgcttccggcgagtattgtgtgtcgcgccgcggggcgggggcgaggggaggaggaaggagggaggcagcgctccggcggctccgcgccccgcactcccggacccgaagccgggaagattcctttcttgtctgttagaaacgtatgtcaaacgaggatacagtgtctggaactattggttctaagatataagtggaatgagcctggatcaggagaagtatgctgagctagagttgaaggaagcttctctttctaacaagagaaagcagagttaaattatggcagagacaagtctgttagaggctggggcctctgcagcctctacagctgcggctttggagaacttacaggtggaggcgagctgctctgtgtgcctggagtatctgaaggaacctgtcatcattgagtgtgggcacaacttctgcaaagcttgcatcacccgctggtgggaggacctagagagggacttcccttgtcctgtctgtcgaaagacatcccgctaccgcagtctccgacctaatcggcaactaggcagtatggtggaaattgccaagcagctccaggccgtcaagcggaagatccgggatgagagcctctgcccccaacaccatgaggccctcagccttttctgttatgaggaccaggaggctgtatgcttgatatgtgcaatttcccacacccaccgggcccacaccgttgtgccactggacgatgctacacaggagtacaaggaaaaactgcagaagtgtctggagcccctggaacagaagctgcaggagatcactcgctgcaagtcctctgaggagaagaagcctggtgagctcaagagactagtggaaagtcgccgacagcagatcttgagggagtttgaagagcttcataggcggctggatgaagagcagcaggtgttgctttcacgactggaagaagaggaacaggacattctgcagcgactccgagaaaatgctgctcaccttggggacaagcgccgggacctggcccacttggctgccgaggtggagggcaagtgcttacagtcaggcttcgagatgcttaaggatgtcaaaagtaccctggaaaagaatattcctagaaagttcggaggctcactctcaacgatctgtccacgggatcataaggctctccttggattagtaaaagaaatcaacagatgtgaaaaggtgaagaccatggaggtgacttcagtatccatagagctggaaaagaacttcagcaattttccccgacagtactttgccctaaggaaaatccttaaacagctaattgcggatgtgaccctggaccctgagacagctcatcctaacctagtcctgtcagaggatcgtaagagcgtcaagttcgtggagacaagactccgggatctccctgacacaccaaggcgtttcaccttctacccttgcgtcctggctactgagggtttcacctcaggtcgacactactgggaggtggaggtgggcgacaagacccactgggcagtgggtgtatgccgggactccgtgagccgaaagggcgagttgactccactccctgagactggctactggcgggtgcggctatggaatggggacaaatatgcagccaccaccacaccttttacccctttgcacatcaaggtgaaacccaagcgggtaggcatattcctagactatgaggccggcacactgtctttctacaatgtcacagaccgctctcatatctacaccttcactgatacttttactgagaaactttggcccctcttctacccaggcatccgggctggacggaagaatgctgcaccacttaccatcaggcccccaacagattgggagtgacaggttgggatgtgggaatgactggggtgaggcagggtcaagtgctacgggcctccttcccgtgtcctgctggaacgtcttcgtgtccacctgggtccagtcctgaatcatcttggagaaacaccttggtttctaggatggttttgtgtggagggggaggtaggactgggctggatgagagagcacagctgtgacttcctcctaactgtcagggtggggagctggttcccagaggattgtctaccctgaagtccatcaggttttctgttgcacaaggacgggtcaggaaggaaggagaggcttttccagaaacaaaaaatctgtgagggtctgacttgctcaaaccagaggaggaaacagaaacccctgcacatctttttagggggttctttgacccaggatagtcttgcttcttgaggtagatcacaggggtctgtgtacctctgaattcatgagagatgaatgacagatgctctcatgggtctagatattgaggagtttttctgagggcagagattggacatcaacaaggctagaagggtcagggaagtgggctaaaggaacagattcctagagattaatgaagaggagggaggtttctttggtcttctattccaagggtaaggttgcgattatgggtaagattggccagaggtaggaatgtggggagaaggagaggctgaaaagaaagcagaggagaacccaggtccctgcctcagccttcagcagagttggcttattgcctgcctctataccaataagtcagtcaccttgctcctctccagaggcaaagtggaagagatcctgcaagacacatctatcctttcacagtgttcccaagggaacttggaaaggagagtcaggtattagaggaaagagaagggtatttgtatacaaagccctggccttaaagaatgttacttagtagctactcccaaattgtcagccttcttacctggccaaggtgtccaagccagaaaggaaaaaaggttatggagtctttctcaccctaaggacagggtggaagagggtggtatatagggaagggccagataggcaacttcatttggcttgtgtgcatctggcctggaactggtgttaagccaggcttttgcttgtttgttgccatccctcaccctttgccatttcccttttcagagaatgtaaatgattttcatgttaggccaaaataaacaacttatagggtacatatgttgtcataaaaggtaaaagtgatgcatgccaaaccaaactaaaccaatttggattatctgctattcgggtaatcttcacagaaatgactgagagaagaatctgcagtttactgagggcatttcagttcctcctaccacctcaacaggactttgtccagactctcctcctcttacctttgtgccttgactgtggttctttgtggcaagatactttggttggttaaaataatatggaacaaaggatccactgaagtgaaaaaaaaaaaaaaaa

SEQ ID NO: 1109 - DNA, 3401 bp, Homo sapiens
tgcgttgtacccttttacgtgaggcggtgacggcggttcggaagtcgtctggcctccccgcggccgctcgcagcttgctggcctctcccgcgcctcacgtcggactccgtctccgcggcagggaagcagcatggaagctgaggacatccaggaggagttgacctgccccatctgcctggactatttccaggacccggtgtccatcgagtgcggccacaacttctgccgcggctgcctgcaccgcaactgggcgccgggcggcggcccgttcccctgccccgaatgtcggcacccatcggcgcccgccgcgctgcgacccaactgggccctggccaggctgactgagaagacgcagcgccggcgcctgggccccgtgcccccgggcctgtgcggccgccactgggagccgctgcggctcttctgcgaggacgaccagcggccagtgtgcctggtgtgcagggagtcccaggagcaccagactcacgccatggcacccatcgacgaggccttcgagagctaccggacaggtaactttgacatccacgtggatgaatggaagagaagactaattaggctgctcttgtaccattctaagcaggaggagaaacttcttaagtctcagcgtaatctcgtggccaagatgaagaaagtcatgcatttacaggatgtagaagtgaagaacgccacacagtggaaggataagataaagagtcagcgaatgagaatcagcacggagttttcaaagctgcacaacttcctggttgaagaagaggacctgtttcttcagagattgaacaaagaagaagaagagacgaagaagaagctgaatgagaacacgttaaaactcaatcaaactatcgcttcattgaagaagctcatcttagaggtgggggagaagagccaggctcccaccctggagctgcttcagaatccaaaagaagtgttgaccaggagtgagatccaggatgtgaactattcccttgaagctgtgaaggtgaagacagtgtgccagataccattgatgaaggaaatgctaaagcgattccaagtggctgtaaacctagctgaagacacagctcatcccaaactcgtcttctcccaggaagggagatacgtgaaaaatacagcatcagccagttcttggccagtgttttcttcagcatggaactactttgctggatggaggaatcctcagaagactgcttttgtagagagatttcagcacttaccctgtgttctgggaaaaaacgttttcacctcagggaaacattactgggaagttgagagtagagatagtctggaggttgctgttggggtgtgtcgggaggacgtcatgggaattactgatcgttcaaaaatgtccccagatgtgggcatctgggcgatttattggagtgctgctggctattggcccttgataggcttccctggaactcccacccagcaagagccagctctccaccgagtgggggtttacctggatcgtgggactgggaatgtctccttctacagcgctgtggacggagtgcacctgcacaccttttcttgttcttctgtctcacgcctccggccatttttttggttgagtccattagcatctttagtcattccaccagtgactgataggaaatgaggcttttcttcccctgaccaaaactccttccctgtagtccagctgagggacacacatccctgggccctcttctgcccttcatgtctctatcctggatggtccatcttctgggtctccctaacggtaccgtttggtatctgccctttgtgtgcttcacaagaggcagtcccatgggaggtgggtctggccaatggagatgggacaggaaattttccaagacgcttttgggaaatctttttgtagcttttaaagagatgtgcggggaagacatatggatgttagcagccatattggaactgagaacacaggaatggtggaaaggtagaagaaacagagtttttgttgccgttgtgaaattgttgaaatttccttcatgccaagcttcttgttatatgagataattacgcccttattgtataagacaattttagttgtatttggttacttgcagcctgaagtaccgtaactgcactaaagggacgtagtgtgaacatcccgcagtataggcttaagtcacttttgtgaaatttgacaaaggcatagaatctttttctatccagtcaggcattgcctattctttccagtaactactgattcccccacttttctgtcttagaaaattgtgggaatcccccctcactctgcctatgttgcactctctctcttcccaaccataactctgccctcagctattaactgtgctgtgtatttatcaagttggtatgttgtatgtacagtgttattcatgtcatcatgagaatgttgaacgcttgttaaataccttttgctagcctcttcatatgctgttgcatatgactctcatcacaactcagtgagatggaaagacaaatcctatttgtacaaatgagaaaactgaactctttagagtaactagctcagtattggccagctggtaaatggcagtgttgggattaaaatccagttcttatctactctccctttattcagaagcatttattggatgttgatctttgtttcaggttttgattttgttacttttttatactgtgtatattttcctcagtctacccttctgctctagattgtctggactcaggagattgtggcagttactggatagttatttttaagataatgattgcttttctctgtttatataagtcatgtgtacttattgtagaaagtttgtaagatgcaaaaagtataaaaattaaagttatgcactactaacatttcaatatattttctcccagattttcaataaagactttcaggcagtgatttaacgaggattttattttaacttatattttagtttaaggggaacacgtgcaggtttgttctatagatcaattacatgtcacaggggtttggtgtacatattatttcattacccaggtaataagcatagtacccaatagatacttttttgataccccaccctcctccaccctctaccctcaagtagtccctggtgtctgttgttcccttttttgtgtccatgggtactcaatgtttagctctcccttatacgtgagaacatgtgatgtttggttttctgttcatgtgttggtttgcttagggtaatggcctccagctccatccatgttgctgcaaagacatgatctcattctttttttatggctgcatagtattccatggtgtatatgtactatgttttctttatccagtctactgttgatgggcatttaggttgattccatgtctttgctattgtgaatagtgctgcaatgaatatatacatgcaaaaaaaaaaaaaaaaaaa

SEQ ID NO: 1110 - DNA, 1939 bp, Homo sapiens
gtgtatgaaaaataatttcaagtttaacaaacacaaggaaaccgcagggtccatgtcaaagctgatgagctatttctgaaactcgtgcagaattgtggtttgtgtggtctatgtcacggcacccttgagggagagtgggcaattgcctgaacttggaggctgtgtcctgtccccaggctgctccagggctgcctccttccgactgggccttcttatctgggactgttgagggcaacaggccttccgaagaccagtgaagaaggaggccctgcaaacaggaggctgacagggtaggaacgaggccatgatccctttgcagaaggacaaccaggaggagggtgtctgccccatctgccaggagagcctgaaggaggccgtgagcaccaactgcggacatctcttctgtcgagtgtgcctgacacagcatgtggagaaggcctcagcctctggggtcttctgctgccccctctgccggaagccctgttctgaggaggtgctagggacaggctatatctgccccaaccaccagaagagggtgtgcaggttctgtgaggagagcagacttcttctatgtgtggaatgcctggtgtcccctgaacacatgtctcatcatgaactgaccattgaaaatgccctcagccactacaaggaacgactcaatcgccggagcaggaagctcagaaaggacattgcagaacttcagcggctcaaggctcagcaggagaagaaactgcaggctctgcagcagtggctgggccagctggagcacatgccagcagaagcggccagaatccttgacatctccagggcagtaacacagctcagaagcctggtcattgatctggaaaggacggccaaggaattagacaccaacacactgaagaatgctggtgacttactgaacaggagtgctccacagaaattagaggttatttatccccagttggagaaaggagtcagtgaattgcttcttcagccccctcagaagctctgacctgttcatccctgggacacctcacttcaggctcacctcagcctcctctctctccttcctccaacctgtccaggcccccactgggtctacccagtgcatcttcgggcctgccagctcctgaacatgtcaccatttcttcatgtccacagtcatcacctgatgcctgaccctctgactcttggacgatagccagcctccttccaggacaggctcatgcttggggctgccactgtggaggtcggggcccatggtctccaggagcatttgtgaaatctccattttgcctgtaaactgatggtagtgcccatctctcacaatctcattcaaataggatcctccaggcctctgaatggcccgagctcatcagcagtgacaccacctcacatgtggagcccagctgagttcctgcagtacttgttgtctgtaccactcacctggcacttatttattattgttgtggaagacagactcaaagacagcctcccttcatgatcctcacctcttggaattcatgcccttgtttggtcccctccccttgagtgtaagtgggatctgtgacttgcttctaatgaatggaataaggcaaaggtgatagggtgtcactctggcaactgtgttgcattgtatagaactcctccttgctggcccacccttttagagcccctcctaggagccaagagcagcttccagccaacaacaagcagaggccctcagtcttgtggctgcaagaacctgaattctgccaacaacccgagtgagcttggaagcagattcttccccaactgagccggataagaacctagtccagccaacaccttgattatagtcttgtgagtacctaagctgaggacccagtgaagctgtgccaaaatttcccacccacagaaacagtgtgacaataaatgtgtgtgtgtttttttgttaaaaaataaaaaaaaaaaaaaa

SEQ ID NO: 1111 - DNA, 2697 bp, Homo sapiens
accggctgcagtcggctgtgccgggagggtaggatggcgtctggccgatgcggtgatagcaccgaaagcagacggccgccaggcgctccccctaccccccgaagtttctccccagcggcgggggatgggggtaggcggttcctctgttctttctgcgttccccgcggcctcttaccacagagacgcgggcctccaccgtcctagccctcccgccctgttctctagtgcggactagagcgtctcctcgccatttcctgtcgccctggggccccgcggggaaaaagggggagtagcaggacagcggagggaagtcgcgagcttaggtggtgtgtagacgccggaagtgttgggaaggaggccggaagctaggggcggggccaggaagtgaggaggggcgggggtttatgaggagtccaagggagcattggggcagacttgtactcagagccacctgagggacttggcggtggcgcccagcactgtcccctcccctcgtagagacacggttgtcgtttgggagtagggaacactgtgttggggtgggttgtcggcaggacatctctctggctgctcttggggcgaggtgtggaggggcagggctgggggtggagccgggtcgccagggcgtcggtagggaagacccccgcccctcgcccccccaccgaacctctacactggctggctggacactaagatggctgccgttgccatgacacccaaccctgtgcagacccttcaggaggaggcggtgtgcgccatctgcctcgattacttcacggaccccgtgtccatcggctgcgggcacaacttctgccgagtttgtgtaacccagttgtggggtggggaggatgaggaggacagagatgagttagatcgggaggaggaggaggaggacggagaggaggaggaagtggaggctgtgggggctggcgcggggtgggacacccccatgcgggatgaagactacgagggtgacatggaggaggaggtcgaggaggaagaagagggtgtgttctggaccagtggcatgagcaggtccagctgggacaacatggactatgtgtgggaggaggaggacgaggaggaagacctggactactacttgggggacatggaggaggaggacctgaggggggaggatgaggaggacgaggaggaagtgctggaggaggttgaggaagaggatctagaccccgtcaccccactgcccccgcctccagcccctcggaggtgcttcacatgccctcagtgccgaaagagctttcctcggcggagcttccgccccaacctgcagctggccaatatggtccaggtgattcggcagatgcacccaacccctggtcgagggagccgcgtgaccgatcagggcatctgtcccaaacaccaagaagccctgaagctcttctgcgaggtagacgaagaggccatctgtgtggtgtgccgagaatccaggagccacaaacagcacagcgtggtgccattggaggaggtggtgcaggagtacaaggccaaactgcaggggcacgtggaaccactgaggaagcacctggaggcagtgcagaagatgaaagccaaggaggagaggcgagtgacagaactgaagagccagatgaagtcagagctggcagcggtggcctcggagtttgggcgactgacacggtttctggctgaagagcaggcagggctggaacggcgtctcagagagatgcatgaagcccagctggggcgtgcgggagccgcggctagtcgccttgcagaacaggccgcccagctcagccgcctgctggcagaggcccaggagcggagccagcaggggggtctccggctgctccaggacatcaaggagactttcaataggtgtgaagaggtacagctgcagcccccagaggtctggtcccctgacccgtgccaaccccatagccatgacttcctgacagatgccatcgtgaggaaaatgagccggatgttctgtcaggctgcgagagtggacctgacgctggaccctgacacggctcacccggccctgatgctgtcccctgaccgccggggggtccgcctggcagagcggcggcaggaggttgctgaccatcccaagcgcttctcggccgactgctgcgtactgggggcccagggcttccgctccggccggcactactgggaggagcctaaagaaccctcctggcctccagctcagccttctctcacctactatgtctgtccaacagaccggccagaatttagcttcacttgagagagatctggaatggtcgccatgattgaaaccacgcaccattacatcatcattacattaattacatcaacataaattatttcttcccccttcccttttccagcactcaaccaaggagcaaagctcatcccaccccacacccctcccaggtctgctcactgccaggctcctctcccctttgttcagtggagctggcttttctcccagcccctttccatgcctttcactccatttggcaagctctgagggggagcctggggacgggtttgggtccccaggaggagagccttgggtataatctatttttctaggagcctcttgccttgtcacttgcagctttcgccctctgctttgatggctgaggtgaactcatgttctttgggaaaagggaaggcgtgctgtggaaataaaatgtttatttgcttctctaaaaaaaaaaaaaaaaa

SEQ ID NO: 1112 - DNA, 2268 bp, Homo sapiens
ggcggcgccctgggcggccgcggagtcatggacggcagtggacccttcagctgccccatctgcctagagccactccgggagccggtgacgctgccctgcggccacaacttctgtctcgcctgcctgggcgcgctctggccgcatcgtggcgcgagtggagccggcggacccggaggcgcggcccgctgcccgctgtgccaggagcccttccccgacggccttcagctccgcaagaaccacacgctgtccgagctgctgcagctccgccagggctcgggccccgggtccggccccggcccggcccctgccctggccccggagccctcggcacccagcgcgctgcccagtgtcccggagccgtcggccccctgcgctcccgagccgtggcccgcgggcgaagagccagtgcgctgcgacgcgtgccccgagggcgcggccctgcccgccgcgctgtcctgcctctcctgcctcgcctccttttgccccgcgcacctgggcccgcacgagcgcagccccgccctccgcggacaccgcctggtgccgccgctgcgccggctagaggagagcctgtgcccgcgccacctacggccgctcgagcgctactgccgcgcggagcgcgtgtgtctgtgcgaggcctgcgccgcacaggagcaccgcggccacgagctggtgccgctggagcaggagcgcgcgcttcaggaggctgagcagtccaaagtcctgagcgccgtggaggaccgcatggacgagctgggtgctggcattgcacagtccaggcgcacagtggccctcatcaagagtgcagccgtagcagagcgggagagggtgagccggctgtttgcagatgctgcggccgccctgcagggcttccagacccaggtgctgggcttcatcgaggagggggaagctgccatgctaggccgctcccagggtgacctgcggcgacaggaggaacagcgcagccgcctgagccgagcccgccagaatctcagccaggtccctgaagctgactcagtcagcttcctgcaggagctgctggcactaaggctggccctggaggatgggtgtggccctgggcctggacccccgagggagctcagcttcaccaaatcatcccaagctgtccgtgcagtgagagacatgctggccgtggcctgcgtcaaccagtgggagcagctgagggggccgggtggcaacgaggatgggccacagaagctggactcggaagctgatgctgagccccaagacctcgagagtacgaacctcttggagagtgaagctcccagggactatttcctcaagtttgcctatattgtggatttggacagcgacacagcagacaagttcctgcagctgtttggaaccaaaggtgtcaagagggtgctgtgtcctatcaactaccccttgtcgcccacccgcttcacccattgtgagcaggtgctgggcgagggtgccctggaccgaggcacctactactgggaggtggagattatcgagggctgggtcagcatgggggtcatggccgaagacttctccccacaagagccctacgaccgcggccggctgggccgcaacgcccactcctgctgcctgcagtggaatggacgcagcttctccgtctggtttcatgggctggaggctcccctgccccaccccttctcgcccacggttggggtctgcctggaatacgctgaccgtgccttggccttctatgctgtacgggacggcaagatgagcctcctgcggaggctgaaggcctcccggccccgccggggtggcatcccggcctcccccattgaccccttccagagccgcctggacagtcactttgcggggctcttcacccacagactcaagcctgccttcttcctggagagtgtggacgcccacttgcagatcgggcccctcaagaagtcctgcatatccgtgctgaagaggaggtgatgccgggcacgggcgctcctgctgccgtctctgctccaggaagctgcctcctctgggccctctccttcgtctgggaaggcaccagcatgagtcccacacacccagccttctcatttctagaggcttccacctttttatacactcagccttccctctcccaggcaggaggacccccagaccctgttcccctgcagacctcacttctgggagacagagctacagctgggacagctccaagctaccctaacccctcctttcccaggtttctagaatagtgtctggcatgtagtagatgctcaataaacacttgttgaatgaaaaaaa

SEQ ID NO: 1113 - DNA, 1463 bp, Homo sapiens
cttagagggagctgtgttttggtgacctctgaaactcagtactgcagcgaatgagctcctgaccttgaggagtacttaacagaattatgtctcgaagaatcattgtgggaacccttcaaagaacccagcgaaacatgaattctggaatctcgcaagtcttccagagggaactcacctgccccatctgcatgaactacttcatagacccggtcaccatagactgtgggcacagcttttgcaggccctgtttctacctcaactggcaagacatcccaattcttactcagtgctttgaatgcataaagacaatacagcagagaaacctcaaaactaacattcgattgaagaagatggcttcccttgccagaaaagccagtctctggctattcctgagctctgaggagcaaatgtgtggcattcacagggagacaaagaagatgttctgtgaagtggacaggagcctgctctgtttgctgtgctccagctctcaggagcaccggtatcacagacactgtcccgctgagtgggctgctgaggaacactgggagaagcttttaaagaaaatgcagtctttatgggaaaaagcttgtgaaaatcagagaaacctgaatgtggaaaccaccagaatcagccactggaaggcttttggagacatattatacaggagtgagtccgtgctgctgcacatgccccagcctctgaatctagcgctcagggcagggcccatcactggactgagggacaggctcaaccaattctgagtggatattactctgcatcacaatgaagccaacagtcatatcttccgatgtggagatttgagaagcatttgtattggatgtgaccgtcaaaatccgccccatatcactgcaacacctacaagttttcttgcatggggtgctcagactttcacctctggcaaatattactgggaggtccatgtgggggactcttggaattgggcttttggtgtctgtaataagtattggaaagggaagaatcagaatggcaatatatatggagaggagggactctttagtcttgggtgtgttaagaacgacattcagtgcagtctctttaccacctccccaattacactgcagtatgtcccaagacctaccaaccatgtagaattattcctggattgtgaagctagaactgtgagcttcgttgatgttagtcaaagctcccctatatacaccatccctaattgctccttctcacttcctctcagacctatctttttctgtattctcctctgaccagagacaaatcagaaatgtgttcatctgctgtgggaacccctttatcccagaaagccctcttccttgtgccttatcaaacaggacaaataggttcggttttatgtcttgaattgcattctaatgttattaaaactcatttattgtgttactattaaatgtagtaaaaacactaaaagtataaaaaaaaaaaaaaaaaaa

SEQ ID NO: 1114 - DNA, 3399 bp, Homo sapiens
agtttatctttcactttcctgccctgagtgtgagcaagaatttcctgcggttcctctaggaaaattcctttgtgcagatcaggcccgtggattggtgagtgaatcctaaccacgtcttccctggcctgtcttcactcttctccccagaatcaccacttctgcactggtgtctgaaggtgtattgagtgattttgtggagggcagaagtaggaagtctttgggacaaaactgtatttaccttgggatctgtgaacaagaggaacctcagcagccaggacaggcaggagcagtggaatagctactatggcttctggaatcctggttaatgtaaaggaggaggtgacctgccccatctgcctggaactcctgacacaacccctgagcctggactgcggccacagcttctgccaagcatgcctcactgcaaaccacaagaagtccatgctagacaaaggagagagtagctgccctgtgtgccggatcagttaccagcctgagaacatacggcctaatcggcatgtagccaacatagtggagaagctcagggaggtcaagttgagcccagaggggcagaaagttgatcattgtgcacgccatggagagaaacttctactcttctgtcaggaggacgggaaggtcatttgctggctttgtgagcggtctcaggagcaccgtggtcaccacacgttcctcacagaggaggttgcccgggagtaccaagtgaagctccaggcagctctggagatgctgaggcagaagcagcaggaagctgaagagttagaagctgacatcagagaagagaaagcttcctggaagactcaaatacagtatgacaaaaccaacgtcttggcagattttgagcaactgagagacatcctggactgggaggagagcaatgagctgcaaaacctggagaaggaggaggaagacattctgaaaagccttacgaactctgaaactgagatggtgcagcagacccagtccctgagagagctcatctcagatctggagcatcggctgcaggggtcagtgatggagctgcttcagggtgtggatggcgtcataaaaaggacggagaacgtgaccttgaagaagccagaaacttttccaaaaaatcaaaggagagtgtttcgagctcctgatctgaaaggaatgctagaagtgtttagagagctgacagatgtccgacgctactgggttgatgtgacagtggctccaaacaacatttcatgtgctgtcatttctgaagataagagacaagtgagctctccgaaaccacagataatatatggggcacgagggacaagataccagacatttgtgaatttcaattattgtactggcatcctgggctctcaaagtatcacatcagggaaacattactgggaggtagacgtgtccaagaaaactgcttggatcctgggggtatgtgctggcttccaacctgatgcaatgtgtaatattgaaaaaaatgaaaattatcaacctaaatacggctactgggttatagggttagaggaaggagttaaatgtagtgctttccaggatagttccttccatactccttctgttcctttcattgtgcccctctctgtgattatttgtcctgatcgtgttggagttttcctagactatgaggcttgcactgtctcattcttcaatatcacaaaccatggatttctcatctataagttttctcactgttctttttctcagcctgtatttccatatttaaatcctagaaaatgtggagtccccatgactctgtgctcaccaagctcttgaaccttcttacacactcagccccttctgtacagcacctcttgtccaggtgcatctcatacacctgaactcatttgcatcattttaaccatcttttccttgctgtctcccttctttctatttgaacgtccttcactcatcagtaaaatgtaataattgccttgtgccatattgtccccaatattttattgacatttgatagcaatttttttcatcattttccgtactcctaaggaaaactgacctatacctcataaaatgagaccgctatttaggtattacttctgccagatatttatcacccaattgcctctgacactgactaagaagatgaagaaaagcttttcaacagcctttctatatcatcgtgtgataattgttcaccaatgaatgagtccttagccctgtgtcagtttaccctcgatgcccttatttgtgagttaaagagaaaatatcataaatggtatactcttaagtatagaggttttgtatctagaggatctcagttcaactcctgtctctccatataccagcagtgtaactgtgaataacatacttaaatggctgtgcttatttccttttcttttcttttttctttttttttttttttgagatgaagttttgctcttgttccccaggctggagtgcaatggcacgatctcggttcactgcaacctccacctctcagattcaagcaattctcctgcctcagcctcccaagtagctgggattacaggtgcccaccaccacccctggctaaatttgtattttcagtagagacggggtttccccatgttggttaggctcgtctagaacctctgacctcaggtgatccacccgcctcggcctcccaaagtgctgggattacaggcgtgagccacggcgcccagcctgtgcttattttcttaaaataatttttgtattaaaaacttcacattaaataagtgctaatgttttattgcatagtagggtgactagagttaacaataacctattgcatatattttgaaatagctagaagagaggattttgaaagttctcaacacaaagaaatgacacatatttgaggtgatggatatgctaattaccctggttcggttattacgcaatgtatacatgtatcaaaacatcacactgtaccacataaatatgtatatttattatttgtcaattaaaagcaaaataaaacaaaaaaccttcatctaatactttggatcattgtgaaaaaataaattcctgaagtataaagcatctatctaagtgtcttgatctaataagtacttgttctacaaattattgaaaaacataaactctgttaatgtctcatggaacaggttgtgccttcagggaaactaggattggatttactaaattctcattttttagatctcagatactactgtcaaaatgacttcaattctgccttctatatataatacacacatatatttaggattttattgtaattctagtgttgctacatattagtctttatcaaacaaactgaattatgtgggaatcagtttattaattgtaaaaaataattataataaaattagctgatgtagttttttaaaagttaaacgagttttttgaatagcttcactcatttctagc

SEQ ID NO: 1115 - DNA, 8106 bp, Homo sapiens
gatccgctgccgctttccgagcgagtgtcatggcggccggcgtcgagttggcaggagtaacccacggaactgaggaaagtcattagagctgagaaagaagtggcccaatctggacggtgggaattcgtgggaatgagcagaaggccctccgtaggtgactgtgtcactagaggcgggcccctggtaaaattccaggccaggcctctgcgtttctaggcagaacctggagtcggccttgcctgagaacccagctttgtgttatcgtatcctgtctcgcgaaggcaggcgttcaaggatatttggtcggatcgcccggcggcgctaaacgttttcttttttccgagcggaccgggtcgttctctaaactcgccgcgatgtcgtcctggcttgggggcctcggctccggattgggccagtctctgggtcaagtcgggggcagcctggcttccctcactggccagatatcaaactttacaaaggatatgctgatggagggcacggaggaagtggaagcagaattacctgattctaggacaaaggaaattgaagccattcatgcaatcttgagatcagagaatgaaaggcttaagaaactttgtactgatctagaagagaaacatgaagcatcagagattcaaataaagcagcaatctacaagttaccgaaatcaacttcaacaaaaagaggtagaaatcagccatcttaaagccagacagattgcactccaggatcagttgctgaaactgcagtcagctgctcagtcagtaccttcaggagctggtgtaccagcaaccactgcatcatcttcattcgcttatgggattagtcatcatccttcagctttccatgacgatgacatggactttggtgatataatttcatcccaacaagaaataaaccgactctcaaatgaagtttcaagacttgagtctgaagttggccattggaggcatattgctcagacttccaaagcacaaggaacagataactctgatcaaagtgaaatatgtaaactacaaaatatcattaaggaactaaaacagaaccgaagtcaggaaattgatgaccatcaacatgaaatgtcagtactgcagaatgcacaccaacagaaattgacagaaataagtcgacgacatcgagaagaattaagtgactatgaagaacgaattgaagaacttgaaaatctgttacaacaaggtggctctggagttatagaaactgatctctctaaaatctatgagatgcaaaaaactattcaagttctacaaatagaaaaagtggagtctaccaaaaaaatggaacaacttgaggataaaataaaagatataaataaaaaattatcttctgcagaaaatgacagagatattttgaggagagaacaagaacagctaaatgtggaaaagagacaaataatggaagaatgtgaaaacttgaaattggaatgtagtaaattgcagccttctgctgtgaagcaaagtgatactatgacagaaaaggaaagaattcttgcccagagtgcatcagtggaagaagtgttcagactacaacaagcactgtctgatgccgaaaatgaaataatgagattgagtagtttaaaccaggataacagtcttgctgaagacaatctgaaacttaaaatgcgtatcgaagttttagaaaaagagaagtcattactgagtcaagaaaaggaagaacttcagatgtcacttttaaaattgaacaatgaatatgaagtaattaaaagtacagctacaagagacataagtttggattcagaattacatgacttaagacttaatttggaggcaaaggaacaagaactcaatcagagtattagtgaaaaggaaacactgatagctgagatagaagaattggacagacagaatcaagaagctacaaagcacatgattttgataaaagatcagctatcaaaacaacaaaatgaaggagatagcatcatcagtaaactgaaacaagatctaaatgatgaaaaaaagagagttcatcaacttgaagatgataaaatggacattactaaagagttagatgtacagaaagaaaagctaattcaaagtgaagtggccctaaatgatttacatttaaccaagcagaaacttgaggacaaagtagaaaatttagtagatcagctaaataaatcacaagaaagtaatgtaagcatccagaaggagaatttagaacttaaggagcatattagacaaaatgaggaggagctttctagaataaggaatgagttaatgcagtctctaaatcaagactctaatagtaattttaaggataccttacttaaagaaagagaagctgaagttagaaacttaaagcaaaatctttcagaattagaacagctcaatgaaaatttaaagaaagttgcttttgatgtcaaaatggaaaatgaaaagttagttttagcatgtgaagatgtgaggcatcagttagaagaatgtcttgctggtaacaatcagctttctctggaaaaaaacactattgtggagactctaaaaatggaaaaaggagagatagaggcagaattgtgttgggctaaaaagaggctgttggaagaagcaaacaagtatgagaaaaccattgaagaactgtcaaatgcacgtaatttgaatacctctgccttacagctggaacatgagcatttaattaaactcaatcaaaagaaagacatggaaatagcagaactcaaaaagaatattgaacaaatggatactgaccataaagaaactaaggacgttttgtcatctagtttagaagagcagaagcagttgacacaacttataaacaagaaagaaatttttattgaaaagcttaaagaaagaagttcaaagctgcaggaggaattggataaatattctcaggccttaagaaaaaatgaaattttaagacagaccatagaggaaaaagaccgaagtcttggatccatgaaagaggaaaataatcatctgcaagaagaattggaacgactcagggaagagcagagtcgaaccgcacctgtggctgaccctaaaacccttgatagtgttactgaactagcatctgaggtatctcaactgaacacgatcaaggaacatcttgaagaggaaattaaacatcatcaaaagataattgaagatcaaaaccagagtaagatgcaactacttcagtctttacaagagcaaaagaaggaaatggatgagtttagataccagcatgagcaaatgaacgccacacacacccagctctttttagagaaggatgaggaaattaagagtttgcaaaaaacaattgaacaaatcaaaacccagttgcatgaagaaagacaggacattcaaacagataactctgatatttttcaagaaacaaaagttcagagccttaatatagaaaatggaagtgaaaagcatgatttatctaaagctgaaacggaaagattagtgaaaggaataaaagagcgagaactggagattaaacttctaaatgaaaagaatatatctttaactaaacagattgatcagttgtccaaagatgaagttggtaaactaactcagattattcagcagaaagatttggagatacaagctcttcatgctagaatttcttcaacttcccatactcaagatgttgtttaccttcaacagcaactgcaggcttatgctatggaaagagaaaaggtatttgctgttttgaatgagaagactagggaaaatagccatctaaaaacagaatatcacaaaatgatggatattgttgctgccaaggaagcagctcttatcaaactgcaagatgaaaataaaaaattgtccactagatttgaaagtagtggccaagatatgtttagagaaactattcagaatttatcacgtatcattcgagaaaaagacatcgaaatagatgcactaagtcagaaatgtcagactttattggcagttttacaaacatccagcactggtaatgaggctggaggtgttaatagtaatcaatttgaggagcttctacaggaacgtgacaagttaaaacagcaagtaaagaaaatggaagagtggaagcagcaggtgatgaccacagtacaaaatatgcaacacgagtcagcccagcttcaggaagagcttcaccaacttcaagcacaggttttggttgacagtgataataattctaaattacaagtggactatactggcctgatccaaagttatgagcagaatgaaaccaaactcaaaaattttgggcaggaattagcacaagttcagcacagcattgggcagctttgcaataccaaggatcttcttttaggaaaacttgatattatttcaccccagctgtcttctgcatcattgcttactccccagtctgcagagtgtcttagagcaagtaagtctgaagtattgagtgaatcttctgaattgcttcagcaagagttagaagagctaagaaaatcactacaggaaaaagatgcaacaattagaactctccaggaaaataaccacagattgtctgattcgattgctgccacctcagagctagaaagaaaagaacacgaacaaaccgattcagaaatcaagcagctaaaggagaaacaagatgttttgcaaaagttacttaaggaaaaagacctcttaatcaaagccaaaagtgatcaactactttcttccaatgaaaatttcactaacaaagtaaatgaaaacgaacttttgaggcaggcagtaacaaacctgaaggagagaatattaattctagagatggacattggcaaactaaaaggagaaaatgaaaaaatagtggaaacatacaggggaaaggaaacagaatatcaagcgttacaagagactaacatgaagttttctatgatgctgcgagaaaaagagtttgagtgccactcaatgaaggagaaggctcttgcttttgaacagctattgaaagagaaagaacagggcaagactggagagttaaatcagcttttaaatgcagttaaatcaatgcaggagaagacagttgtgtttcaacaggagagagaccaagtcatgttggccctgaaacaaaaacaaatggaaaatactgccctacagaatgaggttcaacgtttacgtgacaaagaatttcgttcaaaccaagagctagagagattgcgtaatcatcttttagaatcagaagattcttatacccgtgaagctttggctgcagaagatagagaggctaaactaagaaagaaagtcacagtattggaggaaaagctagtttcatcctctaatgcaatggaaaatgcaagccatcaagccagtgtgcaggtagagtcattgcaagaacagttgaatgtagtttccaagcaaagggatgaaactgcgctgcagctttctgtctctcaggaacaagtaaagcagtatgctctgtcactggccaacctgcagatggtactagagcatttccaacaagaggaaaaagctatgtattctgctgaactcgaaaagcaaaaacagcttatagctgaatggaagaaaaacgcagaaaatctggaaggaaaagtgatatcattacaggaatgtttggatgaagcaaatgctgcattggattcagcatcaagacttacagaacagttagatgtaaaagaagaacaaattgaagaacttaaaagacaaaatgagctccgacaagaaatgctggatgatgtacaaaagaaattgatgagcttagcaaacagctcagaaggaaaagtagacaaagtcctaatgagaaacctcttcattggtcatttccacacaccgaaaaatcagcgtcatgaagtgttacggttaatggggagcatcctgggcgtcagaagggaggagatggagcagttgtttcatgacgatcagggcggtgttaccaggtggatgactgggtggcttggaggaggatcaaaaagtgttcccaacacacctttgagaccaaatcagcaatctgtggttaatagttctttttcagaactttttgttaaatttctagaaacagaatctcatccatccattccaccaccaaagctttctgttcatgatatgaaacctctggattcaccaggaagaagaaaaagagatacaaatgcaccagaaagttttaaagatacagcagaatccaggtctggtagaagaacagatgtaaatccgtttttggctcctcgctcggcagctgtacctcttattaacccagctggacttggacctggtgggcccgggcatcttcttctgaaacccatctcagatgttttgcccacatttacacctttgccagcgttacctgacaacagtgctggggttgtgctgaaagaccttttaaagcaatagatgattctcaagccagagacaatctagcactttaaagaaaccatgaacactatatgtatgtactttatcacaaagtggcctttggggagaaagtcatgtatttgttcgcaattatgctttctctgaatttaataaaaatattcctaatgcttttagaaactgcaggtgtcaggagcaagtgtttgctatataatctgctttattccttctgatttgacctaatttaagctaggaacatttaatttatcttttaccttaatttacaaaaatacagacagacaaaaatactagtagctatatggcagctttttatttccttttgtgatttccaagctcatttaagctagagattgtggtttatcaagagagtgttttttttttttaaacgaagaataaaaaaatactagtagtggcttctctgcatagtgcagaaagttgatttgaagcatatattgatcatctttagaggactttgtggagacaggccaacaagattgttgctggaaggtcataggttccctgaggtgaagtatgtatttggtcctgtgcaatattatcatgtgtgtagattctttttttgtttgttttaaatagagatggggtctcactatgttgccaggctggcctcaaactcctgggctcaagtgatcctcccacctcagcctcccaaagtgctgggattaaggcatgagccactgcgcctggccctgtgtgtaaattcatgtgactaccaccacaggcaagacacggaagacttccattacaagcatccccctgtgttgccctctcataatcattgccacctctctccctggccctctccttaatccctgacaaccacttactgttctccatctcagtcattttgttattttgagaatgttatataaatggaatcaatatataccctcttgagactggctttttttcactcagcataattcccttgagatccatccaaggctttggatgtatcactagtttgttcctttttattgttgagcatatagtgcagatatatcacttagttttaacagctaaggtatctatttaaagataccatcttaaaactaaatgttacacaaattcatgcaactttcatataagcattaaaccatacagctgcatctacgtaagtataattagcaaaatcactgaacatgccacttcctgcctccgtctgcggtgttgacatatgaggtacagcaatccgagagtcaactgttatcacggtggccactgagggcagtgaaatcactttgatagcaccagtacccagatgtttgaaacttaagaaagtatttctttaatttttcataaacccatcataaaaaaaaaatcccgacttgaaacttaactgtatctggatgttcatatttttattagttgttgaagttgtacatttaaaaagatatttcttgcaaattttgtaaatttctatatgcttttaaaatagaaacatttgtataacaaggaaggatgaaaataaaacaaattcaaatatgtgaatagtcctggctgaggccagaactaaatttggttatttgcaagttttactgtgattaactgtactttctaatgtatttggaagactggaagtcttaattccatgttgatgggtgaaacttgtttttctgaaaaatgaagtaactgaaaatgctgcttcagaatgtcttgtatctccttagataactaatttatattgccattctttatttactatactttaaaggaagttgtcatgcaagttctatattagaactgtcaaactgccaaaaaaaaaaaaaaaaaa

SEQ ID NO: 1116 - DNA, 2408 bp, Homo sapiens
cgggtcaggaggtggtgcgcctcgcgcggcagattcgaagctagggcggggcccgcgggctgaggcagcggctgtggcggcgacgctgggcgtgaggtggcggcggccgcgccctggttgggtccccactgctctcgggggcgccatggacgaggccgtgggcgacctgaagcaggcgcttccctgtgtggccgagtcgccaacggtccacgtggaggtgcatcagcgcggcagcagcactgcaaagaaagaagacataaacctgagtgttagaaagctactcaacagacataatattgtgtttggtgattacacatggactgagtttgatgaaccttttttgaccagaaatgtgcagtctgtgtctattattgacacagaattaaaggttaaagactcacagcccatcgatttgagtgcatgcactgttgcacttcacattttccagctgaatgaagatggccccagcagtgaaaatctggaggaagagacagaaaacataattgcagcaaatcactgggttctacctgcagctgaattccatgggctttgggacagcttggtatacgatgtggaagtcaaatcccatctcctcgattatgtgatgacaactttactgttttcagacaagaacgtcaacagcaacctcatcacctggaaccgggtggtgctgctccacggtcctcctggcactggaaaaacatccctgtgtaaagcgttagcccagaaattgacaattagactttcaagcaggtaccgatatggccaattaattgaaataaacagccacagcctcttttctaagtggttttcggaaagtggcaagctggtaaccaagatgtttcagaagattcaggatttgattgatgataaagacgccctggtgttcgtgctgattgatgaggtggagagtctcacagccgcccgaaatgcctgcagggcgggcaccgagccatcagatgccatccgcgtggtcaatgctgtcttgacccaaattgatcagattaaaaggcattccaatgttgtgattctgaccacttctaacatcaccgagaagatcgacgtggccttcgtggacagggctgacatcaagcagtacattgggccaccctctgcagcagccatcttcaaaatctacctctcttgtttggaagaactgatgaagtgtcagatcatataccctcgccagcagctgctgaccctccgagagctagagatgattggcttcattgaaaacaacgtgtcaaaattgagccttcttttgaatgacatttcaaggaagagcgagggcctcagcggccgggtcctgagaaaactcccctttctggctcatgcgctgtatgtccaggcccccaccgtcaccatagaggggttcctccaggccctgtctctggcagtggacaagcagtttgaagagagaaagaagcttgcagcttacatctgatcctgggcttccccatctggtgcttttcccatggagaacacacaaccagtaagtgaggttgccccacacagccgtctcccagggaatcccttctgcaaaccaaacgttacttagactgcaagctagaaagccaccaaggccaggctttgttaaaagaagtgtattctatttatgttgttttaaaatgcatactgagagacaaacatcttgtcattttcactgtttgtaaaagataattcagattgtttgtctccttgtgaagaaccatcgaaacctgtttgttcccagcccacccccagtggatgggatgcataatgccagcaagttttgtttaacagcaaaaaaggaagattaatgcaggtgttatagaagccagaagagaaactgtgtcaccctaaagaagcatataatcatagcattaaaaatgcacacattactccaggtggaaggtggcaattgctttctgatatcagctcgtttgatttagtgcaaaaatgttttcaagactatttaatggatgtaaaaaagcctatttctacattataccaactgagaaaaaaatggtcggtaaagtgttctttcataataaataatcagacatggtcccatttgcaggaaaagtgcagactctgagtgttccagggaaacacatgctggacatcccttgtaacccggtatgggcgcccctgcattgctgggatgtttctgcccacggttttgtttgtgcaataacgttatcacatttctaatgaggattcacattaatataatataaaataaataggtcagttactggtctctttctccgaatgttatgttttgcttttatctcacagtaaaataaatataattaatggtttgcatgtgaaattcacttttgaaagaacatgttaccttaccttttgttttagaagttttcaagtattaaaatattttttagaattttaaaaaaaaaaaaaaaaaa

SEQ ID NO: 1117 - DNA, 4103 bp, Homo sapiens
agctgagagtgacgcctctgagccgcggaggattgtgggaggaggttgtctccaatttctcctccccctcccggccaagatgtctgacatggaggatgatttcatgtgcgatgatgaggaggactacgacctggaatactctgaagatagtaactccgagccaaatgtggatttggaaaatcagtactataattccaaagcattaaaagaagatgacccaaaagcggcattaagcagtttccaaaaggttttggaacttgaaggtgaaaaaggagaatggggatttaaagcactgaaacaaatgattaagattaacttcaagttgacaaactttccagaaatgatgaatagatataagcagctattgacctatattcggagtgcagtcacaagaaattattctgaaaaatccattaattctattcttgattatatctctacttctaaacagatggatttactgcaggaattctatgaaacaacactggaagctttgaaagatgctaagaatgatagactgtggtttaagacaaacacaaagcttggaaaattatatttagaacgagaggaatatggaaagcttcaaaaaattttacgccagttacatcagtcgtgccagactgatgatggagaagatgatctgaaaaaaggtacacagttattagaaatatatgctttggaaattcaaatgtacacagcacagaaaaataacaaaaaacttaaagcactctatgaacagtcacttcacatcaagtctgccatccctcatccactgattatgggagttatcagagaatgtggtggtaaaatgcacttgagggaaggtgaatttgaaaaggcacacactgatttttttgaagccttcaagaattatgatgaatctggaagtccaagacgaaccacttgcttaaaatatttggtcttagcaaatatgcttatgaaatcgggaataaatccatttgactcacaggaggccaagccgtacaaaaatgatccagaaattttagcaatgacgaatttagtaagtgcctatcagaataatgacatcactgaatttgaaaagattctaaaaacaaatcacagcaacatcatggatgatcctttcataagagaacacattgaagagcttttgcgaaacatcagaacacaagtgcttataaaattaattaagccttacacaagaatacatattccttttatttctaaggagttaaacatagatgtagctgatgtggagagcttgctggtgcagtgcatattggataacactattcatggccgaattgatcaagtcaaccaactccttgaactggatcatcagaagaggggtggtgcacgatatactgcactagataaatggaccaaccaactaaattctctcaaccaggctgtagtcagtaaactggcttaacagagaacaagcttttacagacgtccttaaggcaacagtgcagagatgtaatccttaaaagaactgggaatggcaaaactactgtcggttgatgtgtcctgaaaattattggagttatggcagaagtgcttttttgatcaactggtttgtgttttgctgctgcatttatcccaagaaaaacagctttaatctccagaagaaaaccaaaataccatgggatttatgctgtattgacatcttgccctaaacgtacaacatcatagtaatttgtcatgggcaacatgaccagagagaagatttttgtcatgattttaaatacactgacacgctactgttggttaaatttaaacatgttttacctgcagaaattctctcacaaataacctgcaataacttgaaatgcatacccttttgaacacttccttttctcatgtataaattaaaatgtttgctgcattttgcaaaatgtcaattctctaaaaatgtgtccgtatatttctgtacctgcagtgtagtaaaggtttagacgaaaccccataattatagtggcatactgtcacttaggtttcaagcagcaaaataaacagtgcagctcagaaattgtagtttggttcttgatgtgtttttattacatttggagttgttttgttttttagtaccttcgaaatttcaaattattttatcttcagttaatgattttaaaaagcctgggggcaaataagttggttatttgctttcaagtttttaaaagtagtctttattgatagagtaaggagaactactttctaacaaaacacgtgcatagttatgacagtgatgctttaaaggaataaaattctttttttttaaagagtgatattccttttcaaaagaatactaactctcagaatgttcactttaaacgaatatgccagaacatagacagctaaatgaatgttactctgcatagtgatcatgctggaaggttatttcctaatgccagcaatctaccattgcccaaaacctgctgagtttactcttttagaattgcattcaaagttaatttgtcacacacactaaactttatgattatacattgttttaaaaaatatagtattaggaagcttgattatttttagttaccattacttggcaccaaatgaaagtttccaaaacttccacctaactttgaggtaatgcagaaagtatataactggctttgaaggcaatcccaaaagagttttaaaggttttttgagcagtggcagtatacttaggagaatgaactgtggccttccaaggtaactaccttaaaggaactcagctcatttgaatgtattgagttttggatgtatttgtttcattttttaaaaagttcacattattttatagtgtcgaaaggaagaactaggattaacataatttctttggtttttctattgcttgttattattatgtaaaaactgggtggcagttcagaaggaagattgtggttacagaagagtgacaaccaagaattttttgatcattaaatcagattttataaacagtggaaggagcatggacttaaaacaaggcatgcttattcggttttgtcaaaattttacgaaaatatgtgatatatatttatactaaaaatatataatccttagatttagaaaagcaatcagttaatgtctttagcagactaaagcagtattaaacacaggtacaagttggaaattgtagaaaacggaaagaaaacaaaagacaaaatgtctatggtagggaataaaagtttaagatattataaaattatgtgtattttctcttttacataaatcatttgtgaaaagtgtgctaaactttttttacaagagtgatattaattaggatttatttttcaatataatttggagaccctttgttatccaaataaaaatgatgagtttttgtgcctgtattcaaatatgtatgcatgtgataacccttgaaagctaaagcccttcttaacttttgagttgatggaattagaattcaaagatttgaatgaaatgatttaacctttatcctccaattcttacagtgcccagttctcctgtgctatctttgctttgtacaatagtgcatcttccactttctagagagaaagcatgcacttgttatttggaaaactgggctaaatatataacagtatccaaagttataccataataatttattgtaattgtgtattacatagctttgtttacccagatataggtgcgttcttttttttctgttagtcatctgtgacttttgttctggaatacaggtttttaaatatatcttaacagtctgactaacttaaaataatttattcttcccttaaaacatttttctgtgtttttgtgcatcaaatattgtagagttgaaatcttagagattgcttatcgaaatataaatttaggggaagttaaaaatcgattggcaaatttgtagcatttattcactgattaaatcttttccacttttgtgaaaaccataccagtggtttacatcatattgtaatgtgttcatctcattcttctttttatccctaaacctagctaaaagttactgcaaagaaatctttggctgccacaagtagatgctctctactacaagagctggatttccattactcactcttgctcttacattaaagttgttgattaaatactttttctctacatcttaaaaaaaaaaaaaaaaaa

SEQ ID NO: 1118 - DNA, 2044 bp, Homo sapiens
ggacgtggggcttttgcagctcagctggttccggctggggaagatggcggtggctggggcggtgtccggggagccgctggtgcactggtgcacccagcagttgcggaagactttcggcctggatgtcagcgaggagatcattcagtacgttttgtcaattgagagtgctgaagagatacgagaatatgttactgatctcctccagggaaatgaaggcaaaaaaggtcaattcatagaagaacttataaccaaatggcaaaagaatgatcaggagttgatttcggatcctttgcagcagtgcttcaaaaaagatgaaattttagatgggcagaaatcaggcgaccatctaaagcggggtaggaagaaagggagaaacagacaggaagttcctgcatttactgaacctgacacgactgcagaggttaaaacaccttttgatttggccaaggcacaagagaacagcaactccgtaaagaagaagacaaagtttgtcaatttatacacaagagagggacaggacaggcttgcagtcctgctccctggtcgtcacccttgtgattgcctgggccagaagcacaagctcatcaataactgtctgatctgtgggcgcattgtctgtgaacaagaaggctcaggcccttgcttattctgtggcactctggtgtgtactcatgaggaacaagatattttacagcgtgactcaaacaagagccagaaactgctaaagaaactcatgtcaggagtggagaattctggaaaggtggacatctctaccaaggaccttcttcctcatcaagaattgcgaattaagtctggtctggagaaggctatcaagcataaagacaaactgttagagtttgacagaactagtattcgaaggacccaagtcattgatgatgagtcagattactttgccagtgattctaaccaatggttgtccaaacttgagcgggaaaccttgcagaagcgagaggaggagctgagagaacttcgacacgcctctcgactttctaagaaggtcaccattgactttgcaggaaggaagatcctggaagaagaaaattcactagcagagtatcatagcagactagatgagacaatacaggccattgccaatggaaccttgaaccagccactgaccaaattggatagatcttctgaagagcctttgggagttctggtaaatcccaacatgtaccagtcccctccccagtgggttgaccacacaggtgcagcctcacagaagaaggctttccgttcttcaggatttggactagagttcaactcatttcagcaccagttgcgaatccaggatcaagaatttcaggaaggctttgatggtggctggtgcctctctgtacatcagccctgggcttctctgcttgtcagagggattaaaagggtggagggcagatcctggtacaccccccacagaggacgactttggatagcagccacagctaaaaaaccctcccctcaagaagtctcagaactccaggctacatatcgtcttcttcgtgggaaagatgtggaatttcctaatgactatccgtcaggttgtcttctgggctgtgtggacctaattgactgcttgtcccagaagcaatttaaggagcagtttccagacatcagtcaagagtctgattctccatttgttttcatctgcaaaaatcctcaggaaatggttgtgaagtttcctattaaaggaaatccaaaaatctggaaattggattccaagatccatcaaggagcaaagaaggggttaatgaagcagaataaagctgtctgacccaggagaaaaggaactatacagcatagtggagttttgtgtactaaaattgctatctactggtcctttggaattgaagtagtagaaacctaaaggcttggcgtcaggcttgaatatctcagaacttaaactcttaccaaaatctgtatatttttcttaaggagtgggattcctactttatgtaatggggtcgaaatctttgaacacattatttataaaaacctgtttaaaaattctaaaaaaaaaaaaaaaaaa

SEQ ID NO: 1119 - DNA, 660 bp, Homo sapiens
atgccgggcccacttcgcggccagcatttctacgccgtggagaggagggcatattgcgagggctgctacgtggccaccctggagaaatgtgccacgtgctcccagcccatcctggaccggatcctgcgggctatggggaaggcctaccaccctggctgcttcacctgcgtggtgtgtcaccgcggcctcgacggcatccccttcacagtggatgctacgagccagatccactgcattgaggactttcacaggaagtttgccccaagatgctcagtgtgcggtggggccataatgcctgagccaggtcaggaggagactgtgagaattgttgctctggatcgaagttttcacattggctgttacaagtgcgaggagtgtgggctgctgctctcctctgagggcgagtgtcagggctgctacccgctggatgggcacatcttgtgcaaggcctgcaggcctggcgcatccaggagctctcagccaccgtcaggactgactgctgagtcttccatgaagtacctgctgggttctcagttccagttcccatcctttgattgatcactctccctgacatccacctgtatgactttgtcaccaaatgctgtcttctctttctccaatcaagaaataataatccctcgagtttacaaaacaaaaaaa

SEQ ID NO: 1120 - DNA, 8415 bp, Homo sapiens
tcgttctcatttgggtgtctgcactgttggaagctactgcactgtgtttccacgcagacagagtacagtgggaaaggctttctccagctgatggatggctgttctctttatttggagtatcttactggttatgtaagcgacctcgagagaaattatcctgacccagatcggaggatgcagtagtgcttcagctgcaggatttcttagtcgttaacaccacagtgctgatgacaaagagcgagttgtaatcctcatcactgccagggctgagccagagcagacagaaaatcgtcatttgctcgttggagacttgttaggttacagctcctgcttcgttctgtggtcttggcttttcttcctatacaatgacgccgctgcaagtgagctcagaaatgcttggtttgagagccatttgcctgtgatttttgaagactaaagaagtatttacactagatactcttccagaacaaaatagaaatttcagcaaatacttactgacctttaaagccttgttgtggatttctgagatttaaagatactttaaaattctcaagaacaaagtccttattccttaaatggatacagagtgagagtatatagacaagactctgccacccagtggtttactggcataattactcatcatgatctcttcacccgcaccatgatcgttatgaatgatcaggtactagaaccacagaatgtcgatccttctatggttcaaatgacctttctagatgatgttgttcactctttgttaaaaggtgaaaatattggcattacatcacgacgcaggtctcgtgccaatcaaaacgtcaacgctgttcacagccattatacacgtgcccaagcaaatagtcccagaccagcaatgaactcccaagctgctgtaccaaaacagaatacacaccagcaacagcaacaaagaagtatccgtccaaataagaggaagggctcagatagcagtataccagatgaagagaagatgaaggaggaaaaatatgattatatatcacgaggagaaaatcctaaaggtaaaaacaaacacttgatgaataaaagaaggaaacctgaggaggatgaaaagaaactaaatatgaaaagacttcgaactgacaatgtttcagacttttctgagagcagtgactcagaaaattcaaataagagaataatagataattcctcagaacagaagccagagaatgaattgaaaaataaaaatacttcaaaaataaatggagaagaaggaaaaccccataataatgagaaggcaggagaagagaccctaaaaaatagccagcctccctgggatcaaatacaggaagataaaaaacatgaagaagcagagaagcggaagtctgttgacactcagcttcaagaagatatgattattcattcgtcagaacagtccacagtttctgatcataattctaatgatttacttcctcaggaatgcaatatggataaaacacataccatggaattgctaccaaaggagaagtttgtatccagaccacccacaccaaaatgtgttattgatattacaaatgacactaatttagaaaaggtggctcaggaaaactcaagtacctttggccttcagacacttcagaaaatggatcctaatgttagtgattcaaaacactctattgcaaatgcaaaattcttggaaacagcaaaaaaagattctgaccagagctgggtcagtgatgtagttaaagtggatctaacccaatcaagtgttacaaatgcttcttcaggaaatgatcacttgaacatggaaaaagagaagtatgtctcttacatttctcctttaagtgcagtttctgtcatggaagataagctgcataagcgaagtccacctccagagactataaaatctaaacttaatacttcagtagatactcacaagataaaatccagcccatcacctgaagttgttaaacccaaaataactcattctcctgattctgtaaagtctaaggccacttatgtgaacagccaagctactggtgaaagaagattggcaaataagatagaacatgagctatcaagatgcagttttcatccaattcctactcgaagcagtacattagaaactacaaagagtcctcttatcattgataaaaatgagcattttacagtttacagagatcctgcacttattgggtcagaaacaggagctaatcatatttcacctttcctaagccagcatccttttcctcttcactcctcatctcatagaacctgtttaaatccaggtacccatcatcctgccttaactcctgcaccccatttactagccggatcatctagtcaaactccattacctaccattaacactcatcctctgactagtggtccacaccatgctgttcatcaccctcatttacttcccactgtgttacctggagtgcctactgcctccttacttggtggccacccacgactagagagtgctcatgccagcagcttgagccacttagcgctagcacaccagcaacaacaacagttgttacagcaccagtcacctcatcttcttggacaagcccatccttctgcttcatataatcagcttggactttatccaattatttggcagtatccaaatggaacacatgcatactcaggacttggtttgccttcttctaagtgggttcacccagaaaatgcagttaatgctgaagcttcattaaggaggaattctcccagtccttggctacatcagcccacccctgtgacctcagcagatggtattggattacttagtcacattcctgtcagaccttccagtgcagagcctcatcggcctcttaaaattacagcccattccagtccaccattgacaaaaactttagtagatcatcataaggaagaattagaaagaaaagcttttatggaaccattacggtctgttgcatccacatcagccaaaaatgacctggatctaaataggtcacagactggaaaagattgtcacttacataggcattttgtggatccagtattaaatcagttacagaggccaccccaggagactggagagaggttaaacaaatacaaagaggaacaccgtcgaattcttcaagaaagtattgatgttgctccctttacaactaaaatcaagggacttgagggtgagagagagaattattccagagtggcatcatcatcttccagtcctaaaagccatatcatcaaacaagatatggatgtagaacgctcagtatcagatctttataaaatgaagcactcagtgcctcagagtttaccccaaagtaactatttcactacattgtctaatagtgtggtcaatgaaccaccaagatcatacccatccaaagaagtttcaaatatttacggtgataaacagagtaatgcccttgcagcggcagcagctaatcctcaaactctgacttcatttataacatctctttcaaagcctccacctttgattaaacaccaaccagaaagtgaaggtttagtaggcaagataccagaacatcttccacatcagattgcatctcactcagtaacaaccttcagaaatgattgtaggagtcctacccatttgacagtttcttctacaaatacactccgcagtatgcctgcattacatagagcaccagtatttcacccaccaatccatcacagcctggaaagaaaggaaggcagctatagtagtctttcccctccaactttaactccggtgatgccagtaaatgctggtggtaaagttcaagaatcacagaagcctccaactctaatacccgaaccaaaagactcccaggcaaattttaagagttcttcagaacagagtttgacggagatgtggagacctaataataacctcagcaaagagaaaactgaatggcatgtggagaaaagcagcggaaagttacaggctgctatggcatctgtcattgtgcgtccatcttctagtacaaaaactgatagtatgccagcaatgcagttagcttctaaagatcgagttagtgaaagatcttcagctggggcacataaaacagattgcctcaaactagcagaagccggagaaactggaagaatcattttgccaaatgtgaattcagacagtgttcacacaaaatctgaaaaaaactttcaggctgtctcacagggcagtgttcccagttcagtcatgtctgctgtaaatacgatgtgtaataccaaaacggatgtaatcacatctgctgccgatactaccagtgtttccagctggggtggttcagaagtaatttcctctttatcaaataccattttggcctctacatcatcagaatgtgtatcttcaaaaagtgtcagtcagccagtggctcaaaaacaagaatgcaaggtcagcaccacagcaccagttacattagccagtagtaagacaggaagtgttgttcaacccagttctgggttctcaggcacaactgattttatccatttaaaaaagcacaaggcagcattggctgcagctcagtataaaagtagtaatgccagtgagactgaacctaatgctataaaaaatcagacactttcagcctcccttcctctggatagcactgtaatctgtagtacaattaacaaagcaaactctgtaggaaatgggcaagcttcccagacaagtcaaccaaactaccatactaaactgaaaaaggcctggctcaccagacactcagaagaagataaaaatactaataaaatggaaaattcagggaattctgtatcagaaattattaagccatgttctgtcaacttaatagcctctacatctagtgatatacaaaatagtgtagatagtaagatcatagttgataaatatgtaaaagatgataaagtcaacaggagaaaagccaaaagaacttatgaatctggctctgaaagtggagactcagatgaaagtgaaagcaagtcagagcaaaggactaaaagacaacctaagccaacttacaaaaagaagcaaaatgatttgcaaaagagaaaaggtgaaatagaagaagatttgaaacccaatggagttctcagcaggagtgccaaagaaagaagtaaactgaagttgcaaagcaacagtaatactggcattcctcgttcagtattgaaagattggcgtaaagtcaagaagctgaagcaaactggggaatcctttttacaggatgactcctgctgtgagatagggcctaatttacaaaagtgtcgagaatgtagacttattcgcagtaaaaaaggagaagaaccagctcactcaccagtattttgtagattttactactttagacggttgtcatttagtaaaaacggagtagttagaatagatggtttctcttctcctgaccaatatgatgatgaagctatgagtttgtggacacatgaaaattttgaagatgatgaactagatatagagacttctaaatatatcttggatataataggtgataagttctgtcaattagtaacatctgaaaaaacagctttgtcctgggtgaaaaaggatgccaaaattgcctggaaaagagcagtgagaggagtccgggagatgtgtgatgcatgtgaagcaacattgtttaacattcactgggtctgccaaaaatgtggatttgtggtctgcttagattgttacaaggcaaaggaaaggaagagttctagagataaagaactatatgcttggatgaagtgtgtgaagggacagcctcatgatcacaaacatttaatgccaacccaaattatacctggttctgttttgacagatcttctagatgccatgcacactcttagggaaaaatatggtattaaatcccattgtcattgtactaacaaacagaatttacaagttggaaattttcctacaatgaatggtgtatctcaatctcagcagcaaaatactcctccgaagtctgagaaaaatggtggcagcagcccagagagtgatgtaggcacagataacaagttaactcctccagaatcccagtcaccactgcactggttagcagatcttgcagagcaaaaagccagagaggaaaaaaaagaaaacaaagaacttacccttgaaaaccaaattaaagaagaaagagaacaagacaactctgaatctccaaatggcagaacatcacctcttgtgtcccagaataatgaacaaggctcaaccttacgggatttgctgactacaacagctggaaagctacgtgtggggtctacagatgctggcattgcctttgccccagtatattcaatgggagccccaagtagcaaaagtggacggactatgcctaacattcttgatgacataattgcttcagttgttgaaaacaaaattccaccaagtaaaacctccaagataaatgtaaaaccagagcttaaagaagagcctgaagaaagcataatatctgcagtggatgaaaataataaattatacagtgatataccacattcttggatctgtgagaagcatattttatggcttaaggattataagaatagcagtaattggaagcttttcaaagaatgttggaaacaaggacagcctgcagtggtttctggtgtgcataagaaaatgaacattagcctatggaaggcggaatcaattagtcttgattttggagaccaccaagctgatctcctgaactgcaaagatagcatcatttcaaatgccaatgttaaggaattctgggatggttttgaagaagtttcaaaacggcagaaaaacaagagtggagaaacagttgttttaaaattgaaagactggccttcaggagaagacttcaagactatgatgccagcaagatacgaagatcttttaaaaagtctgccattgccagaatattgtaatccagaaggaaaattcaatttggcctctcatttgccaggattttttgtacgtcctgatctaggacccaggttgtgcagtgcctatggtgtagttgctgctaaagatcatgatataggaacaacaaatctccatattgaagtttctgatgttgtaaatatactagtttatgttggcatagcaaaaggaaatggcattctctcaaaagcaggaattctcaagaaatttgaggaagaagatttggatgacattttaaggaaaagattgaaggactcaagtgaaatacctggtgctctgtggcatatttatgctgggaaagatgttgacaagataagggaatttcttcaaaagatttcaaaagaacaaggccttgaagttctaccagaacatgatccaatacgtgaccaaagttggtatgtgaacaaaaagctccgtcaaaggctgcttgaagaatatggagtcagaacctgtactcttattcagttccttggtgatgctattgttttgccagcgggagcacttcatcaggttcagaattttcacagctgtattcaggtaactgaagattttgtgtctccagaacatcttgtagagtcatttcatttaacacaggaactgagacttttgaaggaagaaatcaattatgatgataaactacaggttaaaaatattttgtatcatgcagtcaaagaaatggtgagagccttgaagatacacgaggatgaagtagaggatatggaagaaaattaagtgtgatccagtttgatatttttaggttgttgaactgggattacttaaccttgaatgatgatatgtatgcacactgactttaagcttcataaaaccatcagtgccaagaaattctctttgtagtaattacttgttactgacaccacagcagtatagcatatgtcacagctcctgtgattcaatgttataaaacaagcagaattttaaaagcagcactatatagctgttttgtattatagtgtatatgatgtttgtgaaaatgccagatttaaaatgatgtatttatttttggtaaaaaataaaaaattctatgctatattgttgatcaagtgtaaatgtgaccttgtacagtttactaaaattactgatatttttcactacattgagacagttactgtgagaataggacacaaacaccagctattgcctgcatctgggaaattgctgaatcgcacagcagtcatgtcataatcagaaaattactgccaaataattgtaaaatttgtaaagtataaagtatataaagtagatactaaatacagacacttcaatattttgttgaagctattgactgtacaattaaacattttcaaaaggtgtaatttatttaaaattgtctcattttggtaaaatttatgtgaacttttaaagctaaatattaaacttaatatgctatgtaaatatatacatatatacatttaatgatgtatttttttaaaacattggcttgcttttgttaaagtgcaagtgttacatatggctttgtacattaaagttgaaaggggttttacattttccattaaaaggactttatcaaaaaaaaaaaaaaaaaaaaaaaa

SEQ ID NO: 1121 - DNA, 5565 bp, Homo sapiens
ctcctgcacggcgagtgctggagcacgacgtaccgctcgctcggtcagggcgccccctccgcccgcctcctgcttcctcctccgctgcctgccgccgccgcctccaccattgtataatgctcggggcgcgcaggcagagaacggcggagtcttagcttcagcctcgcctgctgcccgctccccggcgccaccctcgggcccctggagcggggcactccgcatggagcgggagtagctgaggagtgggcggaaacccctcctgatgcgttagttcccaggtggagctgcatgtgatatatgttgggtaaaggaggaaaacggaagtttgatgagcatgaagatgggctggaaggcaaaatcgtgtctccctgtgacggtccatccaaggtgtcttacaccttacagcgccagactatcttcaacatttcccttatgaaactctataaccacaggcccctgacagagcccagcttgcaaaagaccgttttaattaacaacatgttgaggcggatccaggaggaactcaaacaggaaggcagcctgaggcccatgttcaccccctcctcccagcccaccaccgagcccagcgacagctaccgagaggccccgccggccttcagccacctggcgtccccgtcctcccacccctgcgacctcggaagcactacgcccctggaggcctgcctcaccccggcctcactgctcgaggacgacgatgacacgttttgcacctcccaggccatgcagcccacggctcccaccaaactgtcacctccagccctcttgccagaaaaggacagtttctcctctgccttggacgagatcgaggagctctgtcccacatctacctccacagaggcggccacggctgcgactgacagtgtgaaagggacctccagcgaggctggcacccagaaactcgacggtcctcaagagagccgcgcagatgactcaaaactgatggactctctgcctgggaattttgaaataacgacgtccacgggtttcctgacagacttgaccctggatgacatcctgtttgctgacattgatacgtccatgtatgattttgacccctgcacttcctcatcagggacagcctcaaaaatggcccctgtgtctgccgacgacctcctcaaaactctggctccttacagcagtcagcctgtcaccccaagtcagcctttcaaaatggacctcacagagctggaccacatcatggaggtgcttgttgggtcctaagacccagggacccagcgactatgcccacccagaccccagagcgttcccataaccctgacagttctccacactgtgcatgcacccttgcttgcctttttcagagaaaaagaaaattttacaacaggatcacactagtttttgctttgagcagagttggagtgccttcatccaagtatgaccacttttaatacacttttttgagtggttcctcagagacctactaccctggtataggaaagaatccatttgaagacaatgttgcaatgttgaatgacaaaaataaacagttcaagtgaagcacaaggattaagttggaaaagctgtaaattgcatgtgcatatttgtctattttttctataagttttattgcaagaggtaaagaagaaaactatatatatatatcttatttagataatctcagtaccttttctggcatttttgccctgtataggttgacttggcaattcggcctttttagaggcattaactactcctcgtaagtgttgcatttacatggctgtttagaaaactgctgcccaaatttattttatatttttgtacagattctgcagtttatgatattgtttttctaaaaacaaatgctgtttatacatatgagatagctattttgataggatttgctcacatagttcctgcaaacttcagatgtacaagttgcacttgtacttttatagagttgtaatgttttatatgtgtatggtgcaagagaaaattggatcaaatcaatctgcagttgatgtccccaaatgcaaacacaggcacacacatgcacacacccataaacacacacacagtgctttaagaaagggccaggtgatatcacacccaaatttcacaagcactgaccccctggcaccaacacccgccagtactgtgacttccaaagccagagccacatgtgctcatcaaacttgcattaagcagttggcgggagatggctgtggagctgggggtttaagtgatggttctcttttgctccctcttttgagggtaaagctactgtctttcttaagagtgtatttatgccaagtttgcgcttttaattgtttttattttgttttttaatgaaaacccagatctttcctttttggcataatttttatgatgacctgaaattttacatccgaacaaaattttacatccgaaaagcaaccaacttcttcatggaactcagccctgttgcaatgcttagggcccttaaagaagaaaatctccccagaaggcatccatcatgttgcttaattgtcttctgcagcttcctttccctagagctttccctgtgttgctaagagctgaaaatggcatcttcgtgatcaccacagtgagcttggctcgcctcggccggcccgggatgcactcttacaacatgtgtgactcttgaacctggagttcatcacattacgtcacagcttcccatctggttgctttcctgagtcagctacttcacacttgtcaaggctgttttaccccaaaactcagacaggactttctatgcatgttttccctcctccccccaattcccccccccatcaccttatctcccaggacacacttgagaagtagctttttattcctagtggtgtacatttaattttaaaaaggttgcaatgtatcatgcttgttgccgaaactgtttatggccttcttgtttcagttttttcttttcttccaatggtactttagctgttgagtgcaggttacaacctatattgttatgcagatggcttctttaggaataacttttatatttatttaaaaatttttaaattatgggatgttttgttgttgttgttgtctttgttgttggtcatttgtcaatattcagtcaccaattctgctcacttcttgccatggataaaattgggtctttctggctaattaaaaaagacaactttataaaatggcactttaagcaagccatagttagttttatttttgtaatgcacatggcaaagcaaagacgtttgtgatgaaggaactgctcatctaagcaaaagatttgagtatgatatgataaaggctttctacattctaatttactttttccccccacttgaatgtgttttaaaggctaattatcagctcagtagagcagtgagaaactgatcaaattgcacttgttctcctacaagcaacctccacgcagacacctcgtactgctacaggtgtgtcatttcctttaataggaccagggaccatgtaactgaggtgagggttgtagtagatgcttccagtgtcagtatgcctgttaattttaagagcttccctttcttgcagagaacaagtctgcccagattccatgctttctataactggaggacctggcaaacctgccgcatgctgcacacatctacctacgtacacatatacaatagtattgatgattctgaacaataacagggtaaaacagttggtttgccattgttaaaaactgatttacagtaacttacaacaactgtacttttgttggattagcaaatcatgtgtttaaacaaatcccatatgttgggcaacagttcaaataagcacggagaagtgttgcccaaacttggttctctgactcttatgtatttgtaaggctgggcttcaaaatcaaaacaaaaaccccaaaaacagcaggcaaatgctttttaactctgacaccgttgccataaatccctgatactcaaagtctaacaagaaagacatggaaaattagcagcccattttcagaaagatcaaaatgatctagggttctaattgcttttgcatcctattcttacaaagtgatgtcccaacagggaacagtaggagctggagtgggatctccaagtcccagtttgagtgtgggatgtgcttccagcagtgccttccctttatgaaagacatcacatggcatccagggccaggcaggcagcttgaggtgcctttacgagaaaaccgagctggggctgggagaggacagttattgacactgatgtgcaatgaagtgacaagatgagagcagaatcgtaagagctttgaatttgaagtgagtttttttccccccataagttatttattccttttttctgtgtaaatatatttattttactgtggagcgctaacatctggatcgtaacatgtgcagaatgtatggtaggaatgtattctcttgtaggaatgtaaatctgtattaaaagggggtccaagccaggcccccaggtcttctcattgtatgcacagtccgcattcatttttactcttctctaatatgggtctatttgaaatatgcaaaaggtatgaggaatgttttaatacctccaaatttttaagaaaagcatcaaagggttgatattttttaaagtttttttagtagcactttctctggatgacagaaggagcaaccacatgggcacccttgttcataccaaagggtgagcagtggccagagcctcctctgcacctctcgagtgtctttaccaattgagctttttatcgccatagccccttggagtgccccagctgccctgaggtcaatcaaggaaaatttcttaatgaaataagctccaaagagccaaagtatcaacttacagatcgtttttaaagcttaaatttatgaaccacctttgtggtaaacaatgaattatgaataccgcagggcagccttcttaaatgacaaatgtaaaaaaaaaaaaaaaaaagactctacttcgtgcagcaattgctactctatacgaattgtcttaatttgaaaaccttgctgttacaaattggacctttatacattttctgaaaacaatgaaaagagtatatttaaccttttctggctgtaaatggttaccttcctgtaactgccccgcacctggaggcatggagttgtgtgcatcctgcttatgtacaattgttttcagtgtttctaagaatgagtctgaatggttcttgaaaattagccaggatcaaatgctattgcagacaaagccaataaaaagttggacttcttttggggataacaagttttggaagagaaatgcaggccatatgtgcgcatgaccgagattttgaaaaaagatgtacatagtgacatgtttggtgcatggtttttgaggagggcttttgtcaaaaaggaggtataacctttcccccacagacctgagagctgtgccttttctatgcaatattacagacgttacatcggaacccagatggctgtattcacatgtaggtttgggctgtaatctaaacaattggacagattaaatgtacatggaaatgagcagtcttacttttgtagttttatattatacaataaacagttaaaagatgaaaaaaaaaaaaaaaaaa

SEQ ID NO: 1122 - DNA, 9990 bp, Homo sapiens
aatagtgttggtgtcttgaaactgacgtaatgcgcggagactgaggtcctgacaagcgataacatttctgataaagacccgatcttactgcaatctctagcgtcctcttttttggtgctgctggtttctccagacctcgcgtcctctcgattgctctctcgccttcctatttcttttttttttttttaaacaaaaaacaacaccccctcccctctcccacccggcaccgggcacatccttgctctatttcctttctctttctctctctctctctctctctctcttttttaataagggtgggggagggaaaggggggggaggcaggaaagacctttttctctcccccccgcaataatccaagatcaactctgcaaacaacagaagacggttcatggctttggccgccgcgccaccatctttcgggctgccgagggtgttcttgacgattaatcaacagatgtacagatcagctctcaaaatgtcttctgtgtcttctgagcgtcttctaagacaattgcattagcctcctgctagttgactaatagaattaataattgtaaaaagcactctaaagccacatgccttatgaagtcaatgctgggtatgattttacaaatatggtccggaaaaagaacccccctctgagaaacgttgcaagtgaaggcgagggccagatcctggagcctataggtacagaaagcaaggtatctggaaagaacaaagaattttctgcagatcagatgtcagaaaatacggatcagagtgatgctgcagaactaaatcataaggaggaacatagcttgcatgttcaagatccatcttctagcagtaagaaggacttgaaaagcgcagttctgagtgagaaggctggcttcaattatgaaagccccagtaagggaggaaactttccctcctttccgcatgatgaggtgacagacagaaatatgttggctttctcatctccagctgctgggggagtctgtgagcccttgaagtctccgcaaagagcagaggcagatgaccctcaagatatggcctgcaccccctcaggggactcactggagacaaaggaagatcagaagatgtcaccaaaggctacagaggaaacagggcaagcacagagtggtcaagccaattgtcaaggtttgagcccagtttcagtggcctcaaaaaacccacaagtgccttcagatgggggtgtaagactgaataaatccaaaactgacttactggtgaatgacaacccagacccggcacctctgtctccagagcttcaggactttaaatgcaatatctgtggatatggttactacggcaacgaccccacagatctgattaagcacttccgaaagtatcacttaggactgcataaccgcaccaggcaagatgctgagctggacagcaaaatcttggcccttcataacatggtgcagttcagccattccaaagacttccagaaggtcaaccgttctgtgttttctggtgtgctgcaggacatcaattcttcaaggcctgttttactaaatgggacctatgatgtgcaggtgacttcaggtggaacattcattggcattggacggaaaacaccagattgccaagggaacaccaagtatttccgctgtaaattctgcaatttcacttatatgggcaactcatccaccgaattagaacaacattttcttcagactcacccaaacaaaataaaagcttctctcccctcctctgaggttgcaaaaccttcagagaaaaactctaacaagtccatccctgcacttcaatccagtgattctggagacttgggaaaatggcaggacaagataacagtcaaagcaggagatgacactcctgttgggtactcagtgcccataaagcccctcgattcctctagacaaaatggtacagaggccaccagttactactggtgtaaattttgtagtttcagctgtgagtcatctagctcacttaaactgctagaacattatggcaagcagcacggagcagtgcagtcaggcggccttaatccagagttaaatgataagctttccaggggctctgtcattaatcagaatgatctagccaaaagttcagaaggagagacaatgaccaagacagacaagagctcgagtggggctaaaaagaaggacttctccagcaagggagccgaggataatatggtaacgagctataattgtcagttctgtgacttccgatattccaaaagccatggccctgatgtaattgtagtggggccacttctccgtcattatcaacagctccataacattcacaagtgtaccattaaacactgtccattctgtcccagaggactttgcagcccagaaaagcaccttggagaaattacttatccgtttgcttgtagaaaaagtaattgttcccactgtgcactcttgcttctgcacttgtctcctggggcggctggaagctcgcgagtcaaacatcagtgccatcagtgttcattcaccacccctgacgtagatgtactcctctttcactatgaaagtgtgcatgagtcccaagcatcggatgtcaaacaagaagcaaatcacctgcaaggatcggatgggcagcagtctgtcaaggaaagcaaagaacactcatgtaccaaatgtgattttattacccaagtggaagaagagatttcccgacactacaggagagcacacagctgctacaaatgccgtcagtgcagttttacagctgccgatactcagtcactactggagcacttcaacactgttcactgccaggaacaggacatcactacagccaacggcgaagaggacggtcatgccatatccaccatcaaagaggagcccaaaattgacttcagggtctacaatctgctaactccagactctaaaatgggagagccagtttctgagagtgtggtgaagagagagaagctggaagagaaggacgggctcaaagagaaagtttggaccgagagttccagtgatgaccttcgcaatgtgacttggagaggggcagacatcctgcgggggagtccgtcatacacccaagcaagcctggggctgctgacgcctgtgtctggcacccaagagcagacaaagactctaagggatagtcccaatgtggaggccgcccatctggcgcgacctatttatggcttggctgtggaaaccaagggattcctgcagggggcgccagctggcggagagaagtctggggccctcccccagcagtatcctgcatcgggagaaaacaagtccaaggatgaatcccagtccctgttacggaggcgtagaggctccggtgttttttgtgccaattgcctgaccacaaagacctctctctggcgaaagaatgcaaatggcggatatgtatgcaacgcgtgtggcctctaccagaagcttcactcgactcccaggcctttaaacatcattaaacaaaacaacggtgagcagattattaggaggagaacaagaaagcgccttaacccagaggcacttcaggctgagcagctcaacaaacagcagaggggcagcaatgaggagcaagtcaatggaagcccgttagagaggaggtcagaagatcatctaactgaaagtcaccagagagaaattccactccccagcctaagtaaatacgaagcccagggttcattgactaaaagccattctgctcagcagccagtcctggtcagccaaactctggatattcacaaaaggatgcaacctttgcacattcagataaaaagtcctcaggaaagtactggagatccaggaaatagttcatccgtatctgaagggaaaggaagttctgagagaggcagtcctatagaaaagtacatgagacctgcgaaacacccaaattattcaccaccaggcagccctattgaaaagtaccagtacccactttttggacttccctttgtacataatgacttccagagtgaagctgattggctgcggttctggagtaaatataagctctccgttcctgggaatccgcactacttgagtcacgtgcctggcctaccaaatccttgccaaaactatgtgccttatcccaccttcaatctgcctcctcatttttcagctgttggatcagacaatgacattcctctagatttggcgatcaagcattccagacctgggccaactgcaaacggtgcctccaaggagaaaacgaaggcaccaccaaatgtaaaaaatgaaggtcccttgaatgtagtaaaaacagagaaagttgatagaagtactcaagatgaactttcaacaaaatgtgtgcactgtggcattgtctttctggatgaagtgatgtatgctttgcatatgagttgccatggtgacagtggacctttccagtgcagcatatgccagcatctttgcacggacaaatatgacttcacaacacatatccagaggggcctgcataggaacaatgcacaagtggaaaaaaatggaaaacctaaagagtaaaaccttagcacttagcacaattaaatagaaataggttttcttgatgggaattcaatagcttgtaatgtcttatgaagacctattaaaaaaatacttcatagagcctgccttatccaacatgaaattcccttcttttgttattctttcttttgatgagtaggttaccaagattaaaaagtgagataaatggtcaatgagaaagaatggaagatggtaaacaatcactttttaaaacctgttaagtcaaaaccatcttggctaatatgtactggggaaataatccataagagatatcaccagactagaattaatatatttataaagaaagagaccaaaactgtctagaatttgaaagggtttacatattattatactaaagcagtactggactggccattggaccatttgttccaaaacccataaattgttgcctaaatttataatgatcatgaaaccctaggcagaggaggagaaattgaaggtccagggcaatgaaagaaaaatggcgccctctcaatttagtcttctctcattggccatgtttcagattttgacctagaaatgcgagctgtggttaggcttggttagagtgcagcaagcaacatgacagatggtggcacgctgtttttacccagccctgcctgtacatacacatgcacaccctctctgatatttttgtcctttagatgttcaaatactcagtagtccttttgtttgcggtttagattcattttgtccacacatgtacccattttaaaaaacaatgtcctcgatgcttctgtagtgatttcattttagccaggtatttctttcttgtgtgtgatgaaccagtatggatttgcttttctaagcctcctgttggttactaatctcacttggcacattataactaaaggaatcccctcaattcaaaagcatagatggatacaaatgtcagaccgtgggtttaatttgtttagaacacatggcatttcttcacaaggtaacctgctgtatttatttattttcttttggttaaatataatttccaaactttgtggtcaggcagcgtctaaggttacgttaccacagactgacagttggtatatgtaccagccaatcccttcattaaatgtatacagatttagttaagtagcattaaataggattcttagaagtatgtcctcatagaacttttaatacttaaggctttgtaaaaactatccatgaagggaaagctcctcagcataactgctcagggaaatagggctaaataactgaacattaaataattggttaaaggtgctgttagtcgagcctcaatgcttgctacaaggatgtatgtacaaggactgactttaataatttgcattatattgtcccaaccagtagtttattttttgccacggagatgtagaagatattacaagctactggatgcactgtcagattaacttatttcattaaagaagttgggagaacaaataggaaaaaaaaaacttatttttctagtaaatattaatgtattacatttcaaataatggtgcctgacatattgaataattattttctacagtgtacgtatgcaacaaagatattccatcatgcattagagtcagttctggctctgcctagctgtttacatttgcaaatgtagcaaacaaggtaatgaagcaactatttctattgcagtagatatccttttgtgtgtgtgtgtgtgcattaaagttgtaaacggtaacatgaaacaaatgaaagttcttgctataatggtatggaaaacaagaaggaaatgaaaatatttttatgcctacttaggaaaaaaagggtagcacttattcattccaagtacttttttttttttaatttttaagctcttaactcacattgttatgcttaagatgataaacatatatcctctttttattgctttgtctatgtttcatatgaaacatttcagaaattattttgataagtgttgctggaatctgcaacgctgatttttttttgcattctgtagtcgcatttgcactccatttttacattaattcgcagttgctttgtatcattgttttgtttgggttttgtttctttttcacagtgccgggtcttcgtttcttaaagttggatggcaggtagagttcaaccagttcgtgactgttgtagcgaatgaagttaaaaaaatgtctttctgatgttgtgttgtcattttcatttttgcatttttttgtttgcatattaaaaaaagagaaaagagaaagcaagagacagaaatcaggactaagtcctctgcttcagtttcattgttaacgggccttattctgatctcacctgtcgcgtagctctaatattcacataaactgaaataaagaagtggaatgaggagctttgacattcaaattatgtgatgtaatttatcttccttaggaattttgatggatgcatctcaaaatgtatagccagacttgagaggtgacaattaaagatctaaaaaagagaggagattcccccaaacaacaatatttaattttcttagtaaaaagaataacagaatgcatcgtggcaatccttaagcaacattatctatgtggactgcttaaatcagcaaaacaccagaagtttggttaacttgggcaatatgacaagtattactttttgggcaaaactactcattaagcaatttctctagtgtgtcggacacaaataggttctttatttttggcatgtatgcctttttattttcattcaattttttttttttctcagacagacatagtagtatcaactagcattggaaaatacatatcactattcttggaatatttatggtcagtctactttttagtaaaatatttttggatagcgttgacacgatagatcttattccatacttctttattattgataattttattttcattttttgctttcattattatacatattttggtggagaagaggttgggcttttttgaaagagacaaaaatttattataacactaaacactccttttttgacatattaaagcctttattccatctctcaagatatattataaaatttatttttttaatttaagatttctgaattattttatcttaaattgtgattttaaacgagctattatggtacggaactttttttaatgaggaatttcatgatgatttaggaattttctctcttggaaaaggcttcccctgtgatgaaaatgatgtgccagctaaaattgtgtgccatttaaaaactgaaaatattttaaaattatttgtctatattctaaattgagctttggatcaaactttaggccaggaccagctcatgcgttctcattcttccttttctcactctttctctcatcactcacctctgtattcattctgttgtttgggatagaaaaatcataaagagccaacccatctcagaacgttgtggattgagagagacactacatgactccaagtatatgagaaaaggacagagctctaattgataactctgtagttcaaaaggaaaagagtatgcccaattctctctacatgacatattgagattttttttaatcaacttttaagatagtgatgttctgttctaaactgttctgttttagtgaaggtagatttttataaaacaagcatggggattcttttctaaggtaatattaatgagaagggaaaaaagtatctttaacagctctttgttgaagcctgtggtagcacattatgtttataattgcacatgtgcacataatctattatgatccaatgcaaatacagctccaaaaatattaaatgtatatatattttaaaatgcctgaggaaatacatttttcttaataaactgaagagtctcagtatggctattaaaataattattagcctcctgttgtgtggctgcaaaacatcacaaagtgaccggtcttgagacctgtgaactgctgccctgtttagtaaataaaattaatgcatttctagagggggaatatctgccatccagtggtggaaatgtggagtaaagaagctggtggtctgcttctgtgctgtatgccagccttttgccttaagttgagaggaggtcaactttagctactgtctttggtttgagagccatggcaaaaaaaaaaaaagaaaaaaagatcaagtcgtctttggtgagccagtaaggtgaaagcttgctgactgtccaaggcacaagagaaaattgaggaattgaaatgcaacctgagtatcaaactaaatattctaatcaaaggtaggtactgttaggtggaattctatcagcaggcaactgcaaatgagaagaagatagaaggacgcccgtcgggactttggagggcattgttattttcccaaagaaagacggccaagggcagaggcatggattctttgcagagcacttccttttggtttttcagtactgtttcatagacagtgggctcacatgttcctgatagtgctgcagttgcttagaaagcatcccagttaattgcagtaattagaacttctggaatatgctagggcagaagtatgtcaagtatgtcacatgaagaaaatgtgaaattcaagagtaatccacacgtgagaaactagacaatgtacattcatgtgttctcttgaaaggaaagggagagctgtaagcttcactctgtcctacaccggagaaaagcaggaataactttaccgtggaaataatgtttagcttttatcagagaaaattgtccttctagagcatagagtcccaaaactcaattctggttttcccctgttttttttttttttttttttcccaacatatgaactgcagcatatcactttttctttttgtgcctcaggttcctcacctgtaaaattgaaaaatatatgtattaataatattattaataataataatggtaatgtagtacttgtttgtaaagcactttgagatccttggttgaaaggcaccataggagtgccaagtattattatgtggccaagggggttatttaaactgtcagttcccaaaggccaggaaaggttggggtcatttttcttaaagacgagctgtaaatatcaactaggcagccaatagtgttgactatgaagatgcaaaactattactaggctgataaaatcatagtttcttaatggctaccaataaggcaaatatcacaataataaacgccaaattccttagggcggactatttgacaaccacatggaaaactttgggggaggcatgaggggggaacatctcaaaatgccaatgtaaaatttaacttacagcaatattcaccagcagaaaatgtctttcatatggaatgatttcatgttgctaagaaaaagaattcaatttgtagtcctgatttgaatactagaatgttggctataatagttctgttcttacaacacatgaaattttttcgttttattttattttgttttcatagtgcatgttcatttctactcacaaacatgttcttggtgtatttcttatgcaaacaatcttcaggcagcaaagatgtctgttacatctaaacttgaataataaagttttaccaccagttacaca

SEQ ID NO: 1123 - DNA, 1791 bp, Homo sapiens
gagcccggctgcggatctgggaagcgcctcttcacggcactgggatccgcatctgcctgggatcatcaagccctagaagctgggtttctttaaattagggctgccgttttctgtttctccctgggctgcggaaagccagaagattttatctagcttatacaaggctgctggtgttccctctttttttccacgagggtgtttttggctgcaattgcatgaaatcccaatggtgtagaccagtggcgatggatctaggagtttaccaactgagacatttttcaatttctttcttgtcatccttgctggggactgaaaacgcttctgtgagacttgataatagctcctctggtgcaagtgtggtagctattgacaacaaaatcgagcaagctatggatctagtgaaaagccatttgatgtatgcggtcagagaagaagtggaggtcctcaaagagcaaatcaaagaactaatagagaaaaattcccagctggagcaggagaacaatctgctgaagacactggccagtcctgagcagcttgcccagtttcaggcccagctgcagactggctccccccctgccaccacccagccacagggcaccacacagccccccgcccagccagcatcgcagggctcaggaccaaccgcatagctgcctatgcccccgcagaactggctgctgcgtgtgaactgaacagacggagaagatgtgctagggagaatctgcctccacagtcacccatttcattgctcgctgcgaaagagacgtgagactgacatatgccattatctcttttccagtattaaacactcatatgcttatggcttggagaaatttcttagttgggtgaattaaaggttaatccgagaattagcatggatataccgggacctcatgcagcttggcagatatctgagaaatggtttaattcatgctcaggagctgtgtgcctttccatcccttccggctccctacccctcacttccaagggttctctctcctgcttgcgcttagtgtcctacatggggttgtgaagcgatggagctcctcactggactcgcctctctcctctcctccccccaggaggaacttgaaaggagggtaaaaagactaaaatgagggggaacagagttcactgtacaaatttgacaactgtcaccaaaattcataaaaaacaatagtactgtgcctctttcttctcaaacaatggatgacacaaaactatgagagtgacaaaatggtgacaggtagctgggacctaggctatcttaccatgaaggttgttttgcttattgtatatttgtgtatgtagtgtaactattttgtacaatagaggactgtaactactatttaggttgtacagattgaaatttagttgtttcattggctgtctgaggaggtgtggacttttatatatagatctacataaaaactgctacatgacaaaaaccacacctaaagaaattttaagaatttggcacagttactcactttgtgtaatctgaaatctagctgctgaatacgctgaagtaaatccttgttcactgaagtctttcaattgagctggttgaatactttgaaaaatgctcagttctaactaatgaaatggatttcccagtaggggtttctgcatatcacctgtatagtagttatatgcatatgtttctgtgcatgttctctacacaattgtaaggtgtcactgtatttaactgttgcacttgtcaactttcaataaagcatataaatgttgataaaaaaaaaaaaaaaaaaaaaaaaaaaaaaaaaaaaaaaa

SEQ ID NO: 1124 - DNA, 6432 bp, Homo sapiens
cttgaggattcagtctggtcctgaagggtttggggggagactgcgaccagaagatgtttccatgtcctaattaatgggtgatggtggttgttagtctgactgttgccacggtgatgaagggagacatccaagtgctggtttcagtactgaggcgaatacagggaatttcaacaggctccaggtcttactatgcagcctgaagtgggaccatcccttaaacccactccatcctgtggccacgatgggggccaggacacctttgccttctttctgggtttctttctttgccgagacagggattttgttcccaggaggcactccctggcccatgggatctcagcattcaaagcagcacaggaaacctgggcccctgaaacggggccaccgaagagatcggagaacaaccaggaggaagtactggaaggaaggaagggagatcgctcgtgtcttagatgatgagggcagaaacctgaggcagcagaagcttgatcggcagcgggccctgctggagcagaagcagaagaagaagcgccaggagcccctgatggtgcaggccaatgcagatgggcggccccggagccggcgggcccggcagtcagaggaacaagcccccctggtggagtcctacctcagcagcagtggcagcaccagctaccaagttcaagaggccgactcactcgccagtgtgcagctgggagccacgcgcccaacagcaccagcttcagccaagagaaccaaggcggcagctacagcagggggccagggtggcgccgctaggaaggagaagaagggaaagcacaaaggcaccagcgggccagcagcactggcagaagacaagtctgaggcccaaggcccagtgcagattctgactgtgggccagtcagaccacgcccaggacgcaggggagacggcagctggtgggggcgaacggcccagcgggcaggatctccgtgccacgatgcagaggaagggcatctccagcagcatgagctttgacgaggatgaggaggatgaggaggagaatagctccagctcctcccagctaaatagtaacacccgccccagctctgctactagcaggaagtccgtcagggaggcagcctcagcccctagcccaacagctccagagcaaccagtggacgttgaggtccaggatcttgaggagtttgcactgaggccggccccccagggtatcaccatcaaatgccgcatcactcgggacaagaaagggatggaccggggcatgtaccccacctactttctgcacctggaccgtgaggatgggaagaaggtgttcctcctggcgggaaggaagagaaagaagagtaaaacttccaattacctcatctctgtggacccaacagacttgtctcgaggaggggacagctatatcgggaaactgcggtccaacttgatgggcaccaagttcactgtttatgacaatggagtcaaccctcagaaggcctcatcctccactttggaaagtggaaccttacgtcaggagctggcagctgtgtgctacgagacaaacgtcttaggcttcaaggggcctcggaagatgagcgtgattgtcccaggcatgaacatggttcatgagagagtctctatccgcccccgcaacgagcatgagacactgctagcacgctggcagaataagaacacggagagtatcatcgagctgcaaaacaagacacctgtctggaatgatgacacacagtcctatgtactcaacttccatgggcgcgtcacacaggcctccgtgaagaacttccagatcatccatggcaatgacccggactacatcgtgatgcagtttggccgggtagcagaggatgtgttcaccatggattacaactacccgctgtgtgcactgcaggcctttgccattgccctgtccagcttcgacagcaagctggcgtgcgagtagaggcctcttcgtgccctttggggttgcccagcctggagcggagcttgcctgcctgcctgtggagacagccctgcctatcctctgtatataggccttccgccagatgaagctttggccctcagtgggctccctggcccagccagccaggaactggctcctttgcctctgctactgaggcaggggagtagtggagagcgggtgggtgggtgtgaagggatgagaataattctttccatgccacgagatcaacacacactcccacccttggggtagtagtgtgttgtagtcgtacttaccaagctgagcaacctcttcagctgggaaggccgcaagaggcatagagggagaggaagcacactgcagggctgctgtggcccagtcgtccgctcagccaaggagtcagatggcaatgggtactccagcaggtaggggcacagtgaatgtgtgtatgtatgaaggccacatcaactttatgtagcaaagggcttggtggccaagcctggcccttaaacaactgcagaaagcccttcaacttcagaaggcctcactcaagcctgagagaagttgggagggtggtggggacaggtaagtggcaggaccctgtcaggattgcaggtgcctggcttgctgtggctatgggaatcagctggtggctaggtttctagcgcatttgatttctccaggtttgctgtgtctcacagaggcagtaggaacccagctctcagggctgtcttggtggatgggccctgcaagacacaggctcagcatgcagaagtgcatgaacagggtccctggatcagggttgttctgggagtcctgtcagcttccccaggagctctctgctgagcagcccagcacaacccccaggaaacacaaatggggtccaggtcaccagcctgactgcacacagctaggcatgcctgggaatcctgctgccagagaaccattcccaagccatggcatgctccttgaagaatctctcctctctctctctctctggaaagacccaactttctcactgctgtcagccaagtcatggttggtaaccatgtaggttcttgggagggaatgggacagggtgaataaagcagggaatattttagaaccacaagagatcagcagtggcaggacccttaggaatctagtacaaccttgttgctttaggtgagtcacactcagaaaatggggcttgccctgggtcacctagctggttaatggcagcattcagaacttcaagttctcttgatttctttgttcccactgtcccccaagaaactagtatctctggcctcctgggggcccattctgcatgccctccccacttcccccgattcagagacttagaagcatcagagttgataaattagattgaaaccattccagtaggaaatcaggcagttccctgttgaaagttgtctggctttttgcacgtgagtatgatccaggattggcctgtgtctggcccctccgcgagggctactcagcagtaagcaggccttagtacggctgctgcacacttctcggtctaggtgggagagagtgcataaaggttctggggctgggcctgagcctaactccctccactaccgctatttctccttggatggcaccatccaccctgcaggcttgggaactgtaagctcaagcttttgctcatttgtcatttaccctggtggaggcttcttgcccagatagagatctgaaattggtgggaagcaagcaggggtcgtaccttgctttagagtagatgtttggaaaagctaagtagaaattttttaaaatagaagttgtattttaaacgtgttaggctttataggtgaaggacttgttttgacttaagtagaagtaatatgctctcatttctttgtaatctagattttcctatgttgaatgcttaaagcaaggcatacctgtcctagcaggatctgcccacacctcggccgtacatctctgtgagagaccccctccaacgattagcttttgcaacatggtccagtttctagagggcactagaactttgtgccagcgctggcgagataccatggtgccatcctcctttctatagttccagtttagcccttccctgcctttaaggagaagagatcttcatggtgacatttgagatgatggaaactagatcgtctctaatgttaggtcaagctatttctctggatctatgattttaagatagaacaggctggttctgagttctggtgagacggagaccccggtggcagtggaaaaatcagaagcacaaaggaaaactcttggcctctgctttctcctgtagcacaaagagggagttggctggatcttttggtggagtcaggaaagacaggctgagctttctagcctaagtgtggagaaggatagcctcagccacaaaactctgtcaggcattgaatgacaagcatcagtagctgagtgcactcctggtgatcctggttttccttgaccactggccctggggccatgggtgcatggactcgtaaagctgctagggcccctagaaaccacctgggttcagcctctcccacaataagagttcttgcccttcataccctctacctggatggatggtctttgggcagggaattaatgacagaatgagcagtccctaatggtattgggcagttgggagtgagtttaggcagcttctctgtaaccgcttctggggccacaccccaaaactctacaccctctgccccagaacaattctgcagagtggtgaagttcacttccccaactcttctccaagtctagctttcctttccttctggctccaaggtgctctgtgtccgtctgtgtatgtgtgtgtctgtgcgtctgtgtgtttatttggggaaaagggcaatcagcaatcaactgaggtttcttaattgtgattatattcctgagaatgaatgagtaggaaaggaataaggatgttgttatgatcgcctgtggattttgtccattcatctcatgctctctgaacagaaggtatacctgggaagataccagctttttctctcagggttctgagtcagaggacaccatccaagaatgttgttagcttttcagttcccgctctgcattgcctgaaaaaactggtatgttgcacgtatgcttttggttgaaattgaacatactctagtgaatgtgccttaaaaatcaagacactagttcagaggaagcacataatgtccagatctatggcgaacacaggtgttggaagccaggactgtgataatcagaagctataagagaactttcggagcctgcctccttcagtgacaagtagggcacaaaattctagaagcagaaggttgtttttttttttttttctccattctgaaaatagcaggacatttacctcttaaataaacttagcatttagaggtaattctaaatttaacaagtgacagggttggtttcaaagaaaaaggtccatgctttgcttacaatggagtctgcagtgaggggagatgctgggatagccatttccatggctctgttatgcaagcacaaatttcatctcctagatggacttcctggttttctcttactgcagtaacactggccttcccttctctaattccttaccccagctgcggcatccctgtgttaactcaggatgccaagtggccctcagattacacttctccagatagctgaatgagtctgctttcactgtgactgggacctgaatgacctgcagtcagggcccagagttgggactctatactaccctgggctctggtctgtaggtttgtagtagccaccggtaataagccaagggctaggctcttgtttgagtttatggccacctggaattttcagtcatctcatgatacaggcgggaggggcagaacagatagattacgacaggtttggtttttaaattttccaaccaagtggaaaggcaagttggtcttatagaaagcactactgcacttagtagctatgtgattttgagcaaaccacataatctctctaggtccattttcctaaccacaagataaagatgttacattgtcaaagcttgccgtaggatttggggtgaatgaaaattattccttgctttcatcactacctttatagctctcatcactacctttatagctcatcactgtgcctttttttctttcctaagaaagacatcacatccctctcctctcctcctctgtgctcctgtccctccctccccctagcaaggtccaggcaaagctggagatgaggctgagatccagagtttcctagaacgcaacttaggatggctaggaaagggaagcctgactgctcggtcaggagggtgcagtatctcttgctgggaacacagccagttttcacaatgcctagactgtgtatgtctatttgcacaagattgtcttttcctattttggagtggtcagacattttatttttgttcaagattatctggcgttttagacaaatttgcaaaactgtgcttttattgactttttgaataaactttggtattctggaaaaaaaaaaaaaaaaaa

SEQ ID NO: 1125 - DNA, 2107 bp, Homo sapiens
ggcaaaggcaccatgcctctgcgggatgaaaccctccgagaggtgtgggcctctgacagtgggcatgaagaagaaagcctgagcccggaggccccgcggcgccccaaacagcgacccgccccggcacagaggctaaggaagaagaggacggaggcccccgaatccccctgccccacgggatccaagccccggaagcccggagctgggcggacggggaggccgcgggaggagccttccccagacccagcccaggcccgggcgccgcagacggtctacgccaggttcctcagggaccccgaggccaagaagcgcgacccccgggaaacctttctggtagcccgtgccccagacgcggaggacgaggaggaggaggaagaggaggacgaggaggacgaggaagaggaggcagaggaaaagaaagagaaaatccttctgcctcccaagaagcccctgagagagaagagctccgcagacctgaaggagaggagggccaaggcccagggcccaaggggagacctgggaagccctgaccccccaccgaaacctctgcgtgttaggaataaggaagctccagcaggggaggggaccaagatgagaaagaccaagaagaaagggtctggggaggccgacaaggacccctcagggagcccagccagtgcgaggaagagcccagcagccatgtttctggttggggaaggcagtcctgacaagaaagccctgaagaagaaaggcactcccaaaggcgcgaggaaggaggaagaagaggaggaggaggcagctacggtgataaagaagagcaatcaaaagggcaaagccaaaggaaaaggcaaaaagaaagcgaaggaggagagggccccgtctccccccgtggaggtggacgaaccccgggagtttgtgctccggcctgccccccagggccgcacggtgcgctgccggctgacccgggacaaaaagggcatggatcgaggcatgtatccctcctacttcctgcacctggacacggagaagaaggtgttcctcttggctggcaggaaacgaaaacggagcaagacagccaattacctcatctccatcgaccctaccaatctgtcccgaggaggggagaatttcatcgggaagctgaggtccaacctcctggggaaccgcttcacggtctttgacaacgggcagaacccacagcgtgggtacagcactaatgtggcaagccttcggcaggagctggcagctgtgatctatgaaaccaacgtgctgggcttccgtggcccccggcgcatgaccgtcatcattcctggcatgagtgcggagaacgagagggtccccatccggccccgaaatgctagtgacggcctgctggtgcgctggcagaacaagacgctggagagcctcatagaactgcacaacaagccacctgtctggaacgatgacagtggctcctacaccctcaacttccaaggccgggtcacccaggcctcagtcaagaacttccagattgtccacgctgatgaccccgactatatcgtgctgcagttcggccgcgtggcggaggacgccttcaccctagactaccggtacccgctgtgcgccctgcaggccttcgccatcgccctctccagtttcgacgggaagctggcctgcgagtgaccccagcagcccctcagcgcccccagagcccgtcagcgtgggggaaaggattcagtggaggctggcagggtccctccagcaaagctcccgcggaaaactgctcctgtgtcggggctgacctctcactgcctctcggtgacctccgtcctctccccagcctggcacaggccgaggcaggaggagcccggacggcgggtaggacggagatgaagaacatctggagttggagccgcacatctggtctcggagctcgcctgcgccgctgtgcccccctcctccccgcgccccagtcacttcctgtccgggagcagtagtcattgttgttttaacctcccctctccccgggaccgcgctagggctccgaggagctggggcgggctaggaggagggggtaggtgatgggggacgagggccaggcacccacatccccaataaagccgcgtccttggccaaaaaaaaaaaaaaa

SEQ ID NO: 1126 - DNA, 1791 bp, Homo sapiens
tttgttggaagtggagagtggagggtcagaagggagtggaccagttcaggtcccagagggaatcctccctccctctgagccgtctttcttctcctccctatttcgcagatatcccgagattaggtccccagcttccaaagagaggatcagaatgtctcaggataatgacacattgatgagagacatcctggggcatgagctcgctgctatgaggctgcagaagctggaacagcagcggcggctgtttgaaaagaagcagcgacagaagcgccaggagctcctcatggttcaggccaatcctgacgcttccccgtggctttggcgctcttgtctgcgggaggagcgccttttaggtgacagaggccttgggaaccctttcctccggaagaaagtgtcagaggcacatctgccctctggcatccacagtgccctgggcaccgtgagctgtggtggagacggcaggggcgagcgcggcctcccgacaccgcggacagaagcagtgttcaggaatctcggtctccagtcccctttcttatcctggctcccagacaattccgatgcagaattggaggaagtctccgtggagaatggttccgtctctcccccaccttttaaacagtctccgagaatccgacgcaagggttggcaagcccaccaacgacctgggacccgtgcagagggtgagagtgactcccaggatatgggagatgcacacaagtcacccaatatgggaccaaaccctggaatggatggtgactgtgtatatgaaaacttggccttccaaaaggaagaagacttggaaaagaagagagaggcctctgagtctacagggacgaactcctcagcagcacacaacgaagagttgtccaaggccctgaaaggcgagggtggcacggacagcgaccatatgaggcacgaagcctccttggcaatccgctccccctgccctgggctggaggaggacatggaagcctacgtgctgcggccagcgctcccgggcaccatgatgcagtgctacctcacccgtgacaagcacggcgtggacaagggcttgttccccctctactacctctacctggagacctctgacagcctgcagcgcttcctcctggctgggcgaaagagaagaaggagcaaaacttctaattacctcatctccctggatcctacacacctatctcgggacggggacaatttcgtgggcaaagtcagatccaatgtcttcagcaccaagttcaccatctttgacaatggggtgaatcctgaccgggagcatttaaccaggaatactgcccggatcagacaggagctgggggctgtgtgttatgagcccaacgtcttaggatacctggggcctcggaaaatgactgtgattctcccaggaaccaacagccagaaccagcgaatcaatgtccagccactaaatgaacaggagtcgctactgagtcgttaccaacgtggggacaaacaagggttgcttttgttgcacaacaaaaccccgtcgtgggacaaggagaacggtgtctacacgctcaatttccatggtcgagtcactcgggcttcggtgaagaacttccaaatcgtggatcccaaacaccaagaacatctggtgctccagttcggccgagtgggcccagacacattcaccatggacttctgctttccatttagcccgctccaggccttcagcatctgcttgtccagtttcaattagaagctggctgttgaataactcaataaaataccatacccttgccagcaaaaaaaaaaaaaaaaaaaaaaaaaaaaaaa

SEQ ID NO: 1127 - DNA, 3106 bp, Homo sapiens
acgcggcggcgtgccagcctagccactctagcgacggcggggaagagtgtgtacgtggtgggggcttcctcggtggcgggcatggaggcttcgcgctgccggctcagtcccagcggcgacagtgtcttccatgaagaaatgatgaagatgcgacaggctaagctggattatcagaggctactacttgagaagaggcaaaggaaaaagcgccttgagccatttatggtgcagcccaatccagaagccaggctacgtcgggcaaagccaagggccagtgatgagcagactcccttggtgaactgtcatactccccacagcaatgtcatcttacatggtattgatggtccagctgctgtcctgaaaccagacgaagttcatgctccatcagtaagctcctctgttgtggaagaagatgctgaaaacaccgtggatactgcttccaagccaggacttcaggagcgtctccaaaagcatgatatctctgaaagtgtgaacttcgatgaggagactgatggaatatcccagtcagcatgtttagaaagacccaattctgcatcaagccagaattcaaccgatacaggcacttccggttctgctactgccgcccaaccagctgataacctcctgggagacatagacgacctggaggactttgtgtatagtcctgcccctcaaggtgtcacagtaagatgtcggataatccgggataaaaggggaatggatcggggtctcttccccacctactatatgtacttggaaaaagaagaaaatcagaagatatttcttcttgcagctagaaagcggaaaaagagcaaaacagccaactaccttatctccattgatccagttgatttatctcgtgaaggagaaagttatgtcggcaagcttagatccaacctcatggggaccaagtttacagtttatgaccgtggcatctgccccatgaagggccggggtttggtaggagcggcccacacccggcaggagctggctgccatctcctatgaaacaaacgtacttggatttaaaggtcctaggaaaatgtctgtgatcattcctggaatgacactgaatcataagcagatcccctatcagccacaaaacaaccatgacagtttgctctcaaggtggcagaacagaactatggaaaatctggttgagctgcacaacaaggcccccgtctggaacagtgacactcagtcctatgtcctcaacttccgtggccgggtcactcaggcgtctgtgaagaacttccagatagtccacaaaaatgaccctgattatatagtcatgcagtttggacgtgtggcagatgacgtgttcacactggattacaactacccactttgtgcagtacaggcctttggcatcggtctttctagctttgacagtaagctggcgtgtgaatgagagaacagtcaggcagggagcccttctccccacagagctttcaggagcagacagtggcctccccttcccctccctgccccaggacttaaagagcaatagtttgccccttttggaatgatctctgaatatataaaacacacacacaaagagcaatagtttgccccttttggaacgacccctgaatatataaaacacacacacgaagagcaatagtttgccccttttggaacgacccctgaatatataaaacacacacgaagagcaatagtttgccccttttggaacgacccctgaatatataaaacacacacacgaagagcaatagtttgccccttttggaacgacccctgaatatataaaacacacacacaccccgcgcactctcactccttttccaggtttcatagacttggtgagggatcacagcttagcatgggtgagagatgatttaaagcacagggagattcttgtcacattggggtctccaaagctagaatgggatttcatgtgcttggaaacttgcagtagaatcagggactgacatcgcagttcctctcctctcttcattccctcacagcagattggccggcaccaatcttagtcaagagtggctgtgatcacatttgtgatcaattatgtgagaattttatataattgtcttcatttcaattaaggctgaaagcataaactctagaggtgactcagtcaggactgacagtaatgtgataattgccttcattttcaacccaggagtgcctctcacagctatatgactacggatccattagtgaggagcgacacacacacctgtaggcatcctgtgcaaacactttgtcattatcaagagagatggcagtattgaccatttagtttagttaaaaaaaaaaaaaaaaaggtggcaggagaggctttggggaggatcagccagcagacatgagcactgctggcccgtgtggcagagctgtggactttcttctcggctccctcaaccctggctcaggcacagaaggtgttttgctacgtttttttgattattacacccctccacgtattatgtgactcttacaccagttcacccttcccagaatgtatccaaaccttgagaatgcaggagctctgtgagctccaccgtcagcaccattcagctgcatcccttgtgcacagaactgtttgccagcgttgggtgggacacccgtggcggctgctccctcagacctcccttctgtggactgacctctcacctccgcctgttgttcctgcaccacatcagataagcatgtgaaggagggccaactggcagctgcgggacccttggcttgtcccccaccgacaagtcccacctgctgggtgaggacgagactgtttccatctcaggcatgtatcccaccaagtgcctccctcacagccatgcccagaagcctcacacctcgtcaccaccaccaccccccaccccatcctgaggcactgcctggcagataaccctggttggccacagaagctattaatacacgacagcatgtggggaaggacttatggtgggccaggtggacctcatcctgcttcttcctccctctggtttaaagagatatataaactaatttcacataatttgtgtgtgcaggtgattggtttttacataagtcctatttataccttttatatgttacagaaataaaagttaatttatataaaaatg

SEQ ID NO: 1128 - DNA, 11123 bp, Homo sapiens
gaaattttaatttattattcccccctttttttcctgcatctataggataatattgtaaaatagcaattgaaaccaataatcattaaataaatatcaaggaaaatccaagcaaagctttctttttgttggactagtggtgtggtgtttggagacagtctctgaatgtgaacaggaaagcacccatcagcaaaacacgatcactctctagggagacagctgggggaatctgactctggcttctgcttttgttttaagggattaacttccctgtcaagtccaagaagacttgcgtatgagaagattacctgatggacttaattctaagattagcttttttcatcaagatggaaaaagatctttaggagcagaaaaggggagtgctaactgggggagcgagaagggagacgagcaaaagaaacaaaatcttgccacgtggctctgttttgtcagcaagaggatttaagactcacccagggcaaacactgggaccactgtaagagcgctggaacattctgcctcttgagtgaaggggccttctttctagcctctatggcactgaggggtgcgccggctggtggaggagtagtccgatggagccctgcgttccccggggacacagggccaagctttgaggtggaaagtttctggttctgaaacaacaaggagagagtctgtttttcttcctaaaatttggactcttgtctgcacaaactctggtctgttttgcacggtttgtgtgcctttttttccctttatgcaatctttttcagctttagcagcagaaatttgtctagttcaggaaacatgctagagggtggcttcagaaggaagatgatcctgtgtattctgtctctgcatccgaacttttgaagagaaaaattcgagctagagggattcttaaagccttaagttacttgaaatctatgtatttgcaaccctttgtctctggaatcatattacactaaactggaatctcaggctgaatgagaataaccaagtggagtaaaaagaagaaaaccgtttcttgatcaccacttaattaacgatgctctttctccaaaggatcagcacgttcttcctctgagaacttgaaaatacaaatggaccccatgtttttttaagcattaccttttcttagaagactgccatcatcttttatagaggaattttttcactatgcattcagtggatctttataaaatactgaccttctaattagattcaggtcagtcttaattaaagggggaaaaaagcaacgcaagccaaccacaaaaacacatataccaatgaaagaaattggtttaaatttcacagcattaacattactttttaagtaaaacagttcattgaagaaagtatgtatgcagcagtggaacatgggcctgtgctttgcagtgactccaacatcctgtgcctgtcctggaaggggcgtgtccccaagagtgagaaggagaagcctgtgtgcaggagacgctactatgaggaaggctggctggccacgggcaacgggcgaggagtggttggggtgactttcacctctagtcactgtcgcagggacaggagtactccacagaggataaatttcaacctccggggccacaatagcgaggttgtgctggtgaggtggaatgagccctaccagaaactggccacgtgcgatgcggacggaggcatattcgtgtggattcagtacgagggcaggtggtctgtggagctggtcaacgaccgcggggcgcaggtgagtgatttcacgtggagccatgatggaactcaagcacttatttcctatcgagatgggtttgtcctggttgggtctgtcagtggacaaagacactggtcatccgaaatcaacttggaaagtcaaattacgtgtggcatatggactcctgacgaccaacaggtgctgtttggcacggccgatgggcaggtgattgtcatggattgccacggcagaatgctggcccacgtcctcttgcacgagtcagacggtgtcctcggcatgtcctggaactacccgatcttcctggtggaggacagcagcgagagcgacacggactcagatgactacgcccctccccaagatggtccggcagcatatcccatcccagtgcagaacatcaagcctctgctcaccgtcagcttcacctcgggagacatcagcttaatgaacaactacgatgacttgtctcccacggtcatccgctcagggctgaaagaggtggtagcccagtggtgcacacagggggacttgctggcagtcgctgggatggaacggcagacccagcttggtgagcttcccaatggtccccttctgaagagtgccatggtcaagttctacaatgttcgtggggagcacatcttcacactggacactctcgtgcagcgccccatcatctccatctgctggggtcaccgggattcgaggctgttgatggcatcaggaccagccctgtacgtggtgcgtgtggagcaccgggtgtccagcctgcagctgctgtgccagcaggccatcgccagcaccttgcgtgaggacaaggacgtcagcaagctgactctgcccccccgcctctgctcctacctctccactgccttcatccccaccatcaagcccccaattccagatccgaacaacatgagagactttgtcagctacccatcagccggcaacgagcggctgcactgcaccatgaagcgcacagaggacgacccggaggtgggcggcccgtgctacacgctctacctggagtacctgggcgggcttgtgcccatcctcaaagggcggcgcatcagcaagctgcggccagagttcgtcatcatggacccgcggacagatagcaaaccagatgaaatctatgggaacagcttgatttctactgtgatcgacagctgcaactgctcagactccagtgacattgagctgagtgatgactgggctgccaagaaatctcccaaaatctccagagctagcaaatcacccaaactcccaaggatcagcattgaggcccgcaagtcacccaagctgccccgggctgctcaggagctctcccggtccccacggttgcccctgcgcaagccctctgtgggctcgcccagcctgactcggagagagtttccttttgaagacatcactcagcacaactatcttgctcaggtcacgtctaatatctggggaaccaaatttaagattgtgggcttggctgctttcctgccaaccaacctcggtgcagtaatctataaaaccagcctcctgcatctccagccgcggcagatgaccatttatctcccagaagttcggaaaatttccatggactatattaatttacctgtcttcaacccaaatgttttcagtgaagatgaagatgatttaccagtgacaggagcatctggtgtccctgagaacagcccaccttgtaccgtgaacatccctattgcaccgatccacagctcggctcaggctatgtcccccacgcagagcatagggctggtgcagtccctactggccaatcagaatgtgcagctagatgtcctgaccaaccagacgacagctgtagggacagcagaacatgcaggtgacagtgccacccagtacccagtctccaaccggtactccaatcctggacaggtgattttcggaagcgtggaaatgggccgcatcattcagaacccccctccactgtccctgcctcccccgccgcaggggcccatgcagctgtccacggtgggccatggagaccgagaccacgaacacctgcagaagtcagccaaggccctgcggccaacaccgcagctggcagctgagggggacgcagtggtctttagtgccccccaggaggtccaggtgacgaagataaaccctccacccccgtacccaggaaccatccccgctgcccccaccacagcagcacccccgccccctctgccgcccccacagcccccagtggatgtgtgcttgaagaagggcgacttctccctctaccccacgtcagtgcactaccagacccccctgggctatgagaggatcaccaccttcgacagcagtggcaacgtggaggaggtgtgccggccccgcacccggatgctgtgctcccagaacacctacaccctccccggcccgggtagctctgccaccttgaggctcacggccactgagaagaaggtccctcagccctgcagcagtgccaccctgaaccgcctgaccgtccctcgctactccatccccaccggggacccacccccgtatcctgaaattgccagccagctggcccaggggcggggggctgcccagaggtccgacaatagcctcatccacgctaccctgcggaggaacaaccgtgaggctacgctcaagatggcccagctggccgacagcccgcgggcccccctgcagcccctggccaagtccaagggcgggcccgggggggtggtgacacagctcccagcgcggcccccacctgccctgtacacctgcagtcagtgcagtggcacagggcccagctcacagcccggagcctccctggcccataccgccagcgcctccccgttggcctcccagtcctcctacagcctcctgagcccacccgacagcgcccgcgaccgcaccgactacgtcaactcggccttcacggaggacgaggccctgtcccagcactgtcagcttgagaagcccttgaggcaccctcccctgcctgaagctgctgtcaccctgaaacggccacccccttaccagtgggaccccatgctgggtgaggacgtttgggttcctcaagaaaggacagcacagacttcagggcccaaccccttaaaactgtcctctctgatgctgagtcagggccagcacctggacgtgtcccgactgcccttcatctcccccaagtctcctgccagccccactgccactttccaaacaggctatgggatgggagtgccatatccaggaagctataacaacccccctttgcctggagtgcaggctccctgctctcccaaagatgccctgtccccaacgcagtttgcacaacaggagcctgctgtggtccttcagccgctgtacccacccagcctctcctattgcaccctgccccccatgtacccaggaagcagcacgtgctctagtttacagctgccacctgtcgccttgcatccatggagttcctacagcgcctgcccgcccatgcagaacccccagggcactctccccccaaagccacacttggtggtggagaagccccttgtgtccccaccacctgccgacctccaaagccacttgggcacagaggtgatggtagagactgcagacaacttccaggaagtcctctccctgaccgaaagcccagtcccccagcggacagaaaaatttggaaagaagaaccggaagcgcctggacagccgagcagaagaaggcagcgttcaggccatcactgagggcaaagtgaagaaggaggctaggactttgagtgactttaattccctaatctccagcccacacctggggagagagaagaagaaagtgaagagtcagaaagaccaactgaagtcaaagaagttgaataagacaaacgagttccaggacagctccgagagcgagcctgagctgttcatcagcggggatgagctcatgaaccagagccagggcagcagaaagggctggaaaagcaagcgctccccacgggccgccggcgagctggaggaggccaagtgccggcgggccagtgagaaggaggacgggcggctgggcagccaaggcttcgtgtacgtgatggccaacaagcagccgctgtggaacgaggccacccaggtctaccagctggacttcggggggcgggtgacccaggagtccgccaagaacttccagattgagttagaggggcggcaggtgatgcagtttggacggattgatggcagtgcgtacattctagacttccagtatccgttctcagccgtgcaggcctttgcagttgccctggccaacgtgactcagcgcctcaaatgaagagactggtgtggggaggagagagatgcagagagcctttggaagaggtcttcggagatgccagaggagccctctaggggtccgatgcctgggaggaccagaagccaacagcaaaactggaaaagcccggcaggcccaggagagggcgctgacctgtggtcgtcatttatttggttgggttttattaccttttattgtctgttcttcttttcttctttcatttcagtggcatttggaagcaaagagtgctaggcacctgctgttctttcaggaaacagcttggctgtggtaatgctctactgggcccttcagaatgaagacagtctgccttagagcctgctattcttttagacatagggaggatgcattatcctgtattctcctccaacatcaccactagcgtaaaagcaaaaagcttttacaaaacacagccaaaaattctcaagatgcaggttcttggggaatgggatggggacagcatttgatttacactgattatgttactccccaaaaggtgacttaattaataaagggcatttgggcagacacactgtgttggaccaacaaagtaggctctttacaggggtgttctcaccaggtagaaatgcgatttgctcactgaggatgttggggaagggacgaagggtaaagaagaaactgcacgtatacacaggttcacatcactctgcagacagcaatgtgactcagcgtgtgacttgtagcagcagtacgagggctacactcctctgctgaggatgtctacattgaaagcctccactagtttcatcgtttgtcaaagttccgtaggatcagtgatggtcattcagcatgactggttctgggagaaggtgagagacaaaaatggaaagatcctggcctgtggtagtggtagcagttttctcaaataatgtggtgacagtcactagatcctcacatgctgagaaacagcctctactctctctgccccttttactttttaatctggaatgcattactgtaaacatgatctttcccatgagataccatgttctatgccttcccattctaaaagtgtggacaacgcttgatttgaaaccactccttttctcctcttggctacattaaaattcagttgactacaaatgctttctatcaaattagaaatgtaaccaaaaaaatgttaagtgttcaccagggtattaaaatacagaggagtatggtcaaatctttgacaaaattttcatgatcttctctaacaaaaaaagttgtttattaactgtacagactgtttactaaggagctaaaccactgagaaaacgttattaaaattgtaatacctaggtagttggttgatcacagtttgttaattgtataaaaaaaaattacctagaatatctcttcccacttcctcgtcctcgtgagaacctgtgggcagtattcaagccctgatgacaaaacccagtgttttttgttgttgttttttgttgttgttttttgtttttgtttttgtttttctcagtcttacctgtgatgttgtttaggatcaggcccctctcctgggcctgctgtgcaggagcacaggaactatctgctggcgttgggttccaaatttgcattttatttggaaacagacaagtagaagatgctacagaaaagtattttcaaatttaaacgttttttaatcccctgttttagttaaaaaattggaaaagaaaccgacccatttttttcccagatcaagatgacatgacatcactcccaattctctccaaaccccagagaaatactgacgaagttttctgatgtggcaaaggatatttcccatctaataccagtttctcatttatatttaacgtattggacctgatatttttagtgggtgcattcttccagaaagaattcagcaatgttatcagaattaattcttttatatgagtttatgtagcttgatatggtgtttcagtgcttattggttgtgcaataatggttatagcctgttagataatctaaatgcaattcccctgttttgtcgtttaggagataattatttatcttgcttttcatagtgttcttaggaattattttgttgttacgttttggtgagttatacccattttatttatttagaaaaatagtatctttgttaacgacttacatggtcacagtatattttgctgcaagaaataaagaggatatgatagaaggtttttttttttttttttttttttttttgagacggagtcccactcttgtcgcccaactagagtgtagtggcacaatctcggctccccacaacctctgactccagggttcaggtgattattttgcctcagcctcccaagcagctgggattatagacacccgccaacacgccaggctaatgtttttgtatttttaatagagatggggttttgccatgttggccaggctggtcttgaactcctgacctcaggtgatccgcccgcctcggcctcccaaagtgctgggattacagacgtgagccaccactcccggcccatagaaggttttttgctggataatttgtaacttttctaattgggaaaaaattcctattaatcacttaaaaatttttttttgtattttgtgttattgattatatacaaaggagactttttttttgagataacactcaaatagtattctcttcttttgaaaattttatttttatctgaaaataacagttgatctgaaataaaaaggggagacctattagaatgagagtagccaaggaaagagttactaggtaataagcttcactttttgtgttctaattgtttttgagatataaagaccctgaaaaagcccattttagaacctgtttaataagagcaaatataggggaaaatctttgaaatgaaagctacaaatacatgtgagaagaaaaaaatggatttttttagcaaataattaactaagcttctaaatgcctagctccctcccccaaaggcgctttcccccgatggaggcacaggcttctgtctcggatgtttggcgcacgtgagtttgtatgagtttgtaccggagtgaccccggcagccactgcccacctcccctctacccaggggcctgaaaagaggggctgccctcctgcgccaaggcagacacaagctgcgggctgtgcggtcctagtagtgtgacgtttcagttaatagtggtggtcttattttcaactatgctttcattcagtcagtctctgttgactaaatacgacgaaaattcatactttatgcaggagatttctaaaaatttaatgtttattaatagtttatgaatatcaagatacctcattgaatccctaaatttaaaagcagtccagtaaaaggttaactgtataaagaatctatgactttttgagggaagtgtgatatattaacaaatataaccaattctaaatttgttttagctctaacctcatcaaaccaaaggcacagatttgtgtacaatatacccattgaatgtatatcctgagaaaaattggggccaaagaagcaggaaaatctcaaagctctaatggcagcataaatcaaagaatttcacaggctagtgtttttatccatagccattgctcccttgtcaagtgtctcacaaggacatggaagaatgtgttatgttcatcttgtaatcatagcaaaaagtctgcaaaccccagggtcaagcctgctctgccacagggttggatggtgaccttgggcaagtccctggggctggctaggcctccacttgtccatctgtgaaatgaaaggatcagcctggacagccctctaaactcccttacagctctcagcctaagagcgcagcactgaacagcctcatcattccacttttcatgggaaatatatttcacaccattgcctttgtgtagagaaatatttcttttcctgtgttaatgagctatgtactgaatataaaccagtgcatttaaagtaatatcttttgtgcacctctaaatgtgtttggaattgtgtttgttctcatagaatatacaaaagtactgattctaggtaagaaggagtctccacgggtgtgccctgctcagctggatgtccatgagaacagccatgaaataagtcactacttgtccccaaaaccacaggaatatatacctaggtcacctcaaattcctgagtgtgctctgccatgttacacggtcttcaaattgaaaaggtttcttgaaaaggaaagtttggcccagcaactggagaaggagtccatggtgtcgctgtgtgcctgtatcatttggccaagtcaatggttgtaagcaaagttagtggagacaaaaatgtgtccaaaatgtcgtttgagttcctgggatttctgtaatagcacacaactcagaactcttcagcatttgtgtgattccttacctctggctgataaaactctaatgggttgtggcttactttgtttccattttctttggctttgtgcaatttttgtgtaactttacttgtacctatattttctgtttacagttctttttaaggggaggggtagggttctaagatcttgttgtttattgtagataaaaattttttcgtgttgtagaaaagcatgggttatgcgtttgactgaaaaagacactgtattatttaccaaaggggtattgtttttgcatttgtttataaatgcattattttggtactgtaaatttggacataatttctgagtttattactactggcattttctttttcccttttttttttttttaaccgtaagtgcacgatgcaggtgcataggccccagaccaaactagaccaccagcatgttcatgtccagacctcggcagtggcgtgcactgcttgtgcacctcagttcctccagtgttggtttgtttgttttttaattcagcatcctgctggttttactttccaagcaagatctgttgcgactcccaaatgcgttttaatgagctcatccttatttgcctttcttcttacgtattttgtgtattagattgtgcaggagatattctagaaggcattaatggtttgcattcaaaacgatgtggtttgtccaagttattttctgtctttattactgagacggattaatctccttatttttttcttgatgatttgaagttgtaagagttgtccagctattgcttaataaaattttgcagatcaaaaaa

SEQ ID NO: 1129 - DNA, 1669 bp, Homo sapiens
gaggtataagagcctccaagtctgcagctctcgcccaactcccagacacctcgcgggctctgcagcaccggcaccgtttccaggaggcctggcggggtgtgcgtccagccgttgggcgctttctttttggacctcggggccatccacaccgtcccctccccctcccgcctccctccccgcctcccccgcgcgccctccccgcggaggtccctcccgtccgtcctcctgctctctcctccgcgggccgcatcgcccgggccggcgccgcgcgcgggggaagctggcgggctgaggcgccccgctcttctcctctgccccgggcccgcgaggccacgcgtcgccgctcgagagatgatgcaggacgtgtccagctcgccagtctcgccggccgacgacagcctgagcaacagcgaggaagagccagaccggcagcagccgccgagcggcaagcgcgggggacgcaagcggcgcagcagcaggcgcagcgcgggcggcggcgcggggcccggcggagccgcgggtgggggcgtcggaggcggcgacgagccgggcagcccggcccagggcaagcgcggcaagaagtctgcgggctgtggcggcggcggcggcgcgggcggcggcggcggcagcagcagcggcggcgggagtccgcagtcttacgaggagctgcagacgcagcgggtcatggccaacgtgcgggagcgccagcgcacccagtcgctgaacgaggcgttcgccgcgctgcggaagatcatccccacgctgccctcggacaagctgagcaagattcagaccctcaagctggcggccaggtacatcgacttcctctaccaggtcctccagagcgacgagctggactccaagatggcaagctgcagctatgtggctcacgagcggctcagctacgccttctcggtctggaggatggagggggcctggtccatgtccgcgtcccactagcaggcggagccccccaccccctcagcagggccggagacctagatgtcattgtttccagagaaggagaaaatggacagtctagagactctggagctggataactaaaaataaaaatatatgccaaagattttcttggaaattagaagagcaaaatccaaattcaaagaaacagggcgtggggcgcacttttaaaagagaaagcgagacaggcccgtggacagtgattcccagacgggcagcggcaccatcctcacacctctgcattctgatagaagtctgaacagttgtttgtgttttttttttttttttttttgacgaagaatgtttttatttttatttttttcatgcatgcattctcaagaggtcgtgccaatcagccactgaaaggaaaggcatcactatggactttctctattttaaaatggtaacaatcagaggaactataagaacacctttagaaataaaaatactgggatcaaactggcctgcaaaaccatagtcagttaattctttttttcatccttcctctgaggggaaaaacaaaaaaaaacttaaaatacaaaaaacaacattctatttatttattgaggacccatggtaaaatgcaaatagatccggtgtctaaatgcattcatatttttatgattgttttgtaaatatctttgtatatttttctgcaataaataaatataaaaaatttagagaaaaa

SEQ ID NO: 1130 - DNA, 1960 bp, Homo sapiens
gccgtcatctctaagaaacaaccataccactgaatgctactgtgtacttacaaaccacactcatattcgtcacgtcatttcatcttcacccccacctccaaatgaggcttgaaatgagatgagatgttcctccctcccctttcaaccatggacctcacactgtggacttcctcttagagcctctgagttaggtacccaagccaaggcacaatgtccctgccccccataagactgcccagcccctatggctctgatcggctggtacagctagcagccaggctccggccagcactctgtgatactctgatcaccgtagggagccaggagttccccgcccacagcctggtgctagcaggtgtcagccagcagctgggccgcaggggccagtgggctctgggagaaggcatcagcccttctacctttgcccagctcctgaactttgtgtatggggagagtgtagagctgcagcctggagagctaaggccccttcaggaggcggccagggccttgggagtgcagtccctggaagaggcatgctggagggctcgaggggacagggctaaaaagccagatccaggcctgaagaaacatcaggaggagccagagaaaccctcaaggaatcctgagagagaactgggggaccctggagagaagcagaaaccagaacaggtttctagaactggtgggagagaacaggagatgttgcacaagcactcgccaccaagaggcagacccgagatggcaggagcaacgcaggaggctcagcaggaacagaccaggtcaaaggagaaacgcctccaagcccctgttggccaaaggggagcagatgggaagcatggagtgctcacgtggttgagggaaaatccagggggctctgaggaaagtctgcgcaagctccctggcccccttcccccagcaggctccctgcaaaccagcgtcacccctaggccctcgtgggctgaggccccttggttggtggggggccagcctgccctgtggagcatcctgctgatgccgcccagatatggcattcccttctaccatagcacccccaccactggagcctggcaggaggtctggcgggaacagaggatcccactgtccctaaatgcccccaaagggctctggagccagaaccagttggcctcctccagccctaccccaggttccctcccccagggccccgcacagctcagccctggggagatggaagagtctgatcaggggcacacaggcgcacttgcaacctgtgcgggtcatgaggacaaggcaggctgcccacctcgcccgcaccctcccccggcccctcctgctcggtctcggccctatgcgtgctctgtctgtggaaagaggttttcactcaagcatcagatggagacgcactaccgagtccacacaggagagaagcccttctcctgtagcctttgtcctcagcgctcccgggacttctcggccatgaccaagcacctgcggacacacggggccgctccgtaccgctgctccctgtgcggggccggctgtcccagcctggcctccatgcaggcgcacatgcgcggtcactcgcccagccaactcccgcccggatggaccatccgctccaccttcctctactcctcctcgaggccgtctcggccctcgacctctccctgttgtccttcttcctccaccacctgacggggtgtcggtagcgtcttagccaagagtccaattaaagaacgaaaagcgggccggctcggcttctgacctggcaccgctgctacggcggcctagcaaattccgccccagaagcgccccaggaagggcgccgagtgccctctcctggacgatcgcgggtcgcagaagcccaggccagcgagccctacagagtgaggacactgaagtgtgcaggagcgaaggttaacagtaggggagattgtcgatctcatcaccataataaagagtttcctgtgccctcccttca

SEQ ID NO: 1131 - DNA, 4162 bp, Homo sapiens
gtcgcgttgaagccagcgtccggccggcagagcggcgtcggcggggttggccggggcggtgtggcgctagagcctgggcgggccgggggcaaggagtcaaggcttgggggcgggtgacgggcgggcggagggcttgcccccgtgtggtcctcggagcggcccgaggtccagcctcccagcggtcccggaggaggatgcgaccggggggccccgggcggggcggtcggcggcggctgcagcgctagcggcgcgggggctgggcggcggcgccggcatgaggcgcagggccggtgtccgcgggagggtggcgctgccggcggcccggccgctcccgctgcaattgctcgctgggctcgtcgtgccctgccagtggggcccccgcagctctcgtcccggccgccgctggtgaccactcgccgcccctccggaggcttcacccgcgccctcccccaggacgcgccagcggagctccggctccttcgccctggacgcggaggccgcggtgtgcggggcgacggcgaggccggaagatggcctgggtgctcaagatggacgaggtgatcgagtccgggctggtgcacgacttcgacgccagcctctcgggcatcgggcaggaactgggcgccggcgcttacagcatgagtgatgtcttggcattgcccattttcaagcaggaagattccagccttccattggatggtgaaacagagcacccaccctttcagtatgtgatgtgtgctgcaacgtcaccagcagtaaaactgcatgatgaaacgcttacttatttgaaccaaggtcagtcatatgaaattcggatgctggataatcggaaaatgggtgatatgcctgagatcaatggaaaattagtaaagagcatcataagggttgtattccatgacagacggctacaatacacagagcatcagcaacttgaaggatggaagtggaatcgcccaggagacagacttcttgatttagatattccaatgtctgtgggaataattgacacaaggacgaatccaagccagttaaatgcggttgaatttctgtgggacccagcaaaacgcacctctgctttcattcaggtacactgcatcagcacagaatttactccacggaagcacggaggtgaaaagggagtgccctttaggatccaggttgacacctttaagcagaatgaaaatggagaatacacagatcatctacactcagctagctgccaaatcaaagtttttaagcctaaaggtgcagacaggaaacaaaaaactgaccgagagaagatggagaagagaacagctcatgaaaaagaaaagtatcagccgtcctatgataccacaatcctcacagagatgaggcttgagcctataattgaagatgcagttgaacatgagcagaaaaagtccagcaagcggactttgccagcagactacggtgattctctggcaaagcgaggcagttgttctccgtggcccgatgcccccacagcctatgtgaataacagcccttccccagcgcccactttcacctccccacagcagagcacttgcagtgtcccagacagcaattcttcttccccaaatcatcagggagatggagcttcacagacctctggtgaacaaattcagccttcagctacgatccaggaaacacagcaatggctgctcaaaaacagattctcttcctacacaagactgttctctaatttttcaggtgccgacttattaaaactgacaaaggaggatttagttcaaatttgtggtgcagccgatggaattcggctctataattcactgaagtcaaggtcggttagaccccgtttaaccatctatgtctgccgggagcagccaagcagcacagtgctgcaagggcagcagcaagctgcaagcagtgcaagcgagaatggcagtggggcaccctatgtttatcatgcaatctacttggaagaaatgattgcctcagaagttgctcgaaaacttgcgctggtgtttaatatccctctccaccaaattaatcaggtttacagacagggtcccaccggtattcacattcttgttagtgatcagatggttcagaattttcaagatgagagttgttttttattctccacagtaaaagctgaaagtagtgatggcatccacataattttgaagtgatgtcttatatagactgaactgtattcagtaccaaatagtcacgcttaaaagtgtgtgaagactgaatccaagaagtcttgggattggattttaccatatgaaatgtttcatattgaaaacacaagatgacctttctaatgagctgtatgagaggtgaatctcctcactgtcactgccatagccaagcatcctcatgagagtgagcacatcggcacagcatgcatccagctctggaggccacggtgcaggcatagctgcctgctgctctggcagaggccagtaaatacagttcctagaagcagcctttgctgtctttttacactgtatgcggtttggaaatgaatgtagaaacttactgtgggcatttacctttctgtgccagtttggcttttattgcctgaaccttatgctgacctggagaggagatgggggacagtgctgttgtggggccagcagtgaatctgtatgcggagagttgtgttgtgctgatgtggccgttggtggtcaggtaagaggctcggcaccttcttggaagaaatcatgtctgagggtgtacgtttgatatgatcatgccagattggagaagatccaagccaggaagatgggcttgaagcaaactgcattatcaggagtaccttggtgagaggatcagtgtaaatcctaataggtacaaagacttttgtgttttggctttgtcacagatttattgaaaaacttttttgcttctgcttccatttttagcattttagtttctggttttcatttttggagattccttgccttttaaactcgtggtttttctctcattttcttccctctctccctccatctctgaccacccccaccctaaccccccacccccaccatcctattaaacatttttaaagccctaccccagacattggaaataggtgacccaagtagggggagaaagtattattgttgatagcttctgactaggtgttaagggatcttcattatgaacaagatgaatttttttctggaaacactagatgttatcaatcaaacactaaaatgtaccatacaaatcccttaagcctctcaaatattgagctttagtacaatcatggatagacattctggtgatgatttaggggctttttatacaccacatactagcttctttctctataagagtgcctctttcataaaaccaaatgcttgtctgctagcatacttttcaaagggaatccactgttttctcactttcctcccatatctccgtccttcatccaaaaccttcccagaatccatcagcaagcatgtttgaggcctgtggtgtaggggactgaattttttttttaacttctattccattttaattgtaggatatctttgtccatatacccaggtgtcctgatttgaatgtactatttgatcctcattgtgttcaggcaaaaaataggaaatgagtaattttgagtttgaaatctctcccagaagacaaactacttcagtgagtaaaagctttgacattttatgttttattcataaagggggttaattatttgctacaaagaagcacgatctattttcatcatcgatttgaaaatatctgtaactcctatagatcctataggcagagagttttcctttctgactttttccctttgctttcgtgtgaccacatgttttctgtaccagtcactggggaaagaagtgagtttatctcgtttgttttaaaagttttgcttgtctatttagcattcctttttgggtctcaagatttatggaacaataaatgtcatttaatgctgtgtgcttattttgaattcctcatcaggttttagaagcggggtaaaaatacttagatgcttatcagacttgaaattatactgagtggcattgaacgtgagtttgtcccagtgaaacaggctaaataaattttggcaccagcaaatttgttactttgtttttttaatagtaggatgtacacatttcagtataataaatgttttctgattgttttgcaaaaaaaaaaaaaaaaa

SEQ ID NO: 1132 - DNA, 4603 bp, Homo sapiens
ggtgaggtggctttgaccccgggttgcccggccagcacgaccgaggaggtggctggacagctggaggatgaacggagaagccgactgccccacagacctggaaatggccgcccccaaaggccaagaccgttggtcccaggaagacatgctgactttgctggaatgcatgaagaacaaccttccatccaatgacagctccaagttcaaaaccaccgaatcacacatggactgggaaaaagtagcatttaaagacttttctggagacatgtgcaagctcaaatgggtggagatttctaatgaggtgaggaagttccgtacattgacagaattgatcctcgatgctcaggaacatgttaaaaatccttacaaaggcaaaaaactcaagaaacacccagacttcccaaagaagcccctgaccccttatttccgcttcttcatggagaagcgggccaagtatgcgaaactccaccctgagatgagcaacctggacctaaccaagattctgtccaagaaatacaaggagcttccggagaagaagaagatgaaatatattcaggacttccagagagagaaacaggagttcgagcgaaacctggcccgattcagggaggatcaccccgacctaatccagaatgccaagaaatcggacatcccagagaagcccaaaaccccccagcagctgtggtacacccacgagaagaaggtgtatctcaaagtgcggccagatgccactacgaaggaggtgaaggactccctggggaagcagtggtctcagctctcggacaaaaagaggctgaaatggattcataaggccctggagcagcggaaggagtacgaggagatcatgagagactatatccagaagcacccagagctgaacatcagtgaggagggtatcaccaagtccaccctcaccaaggccgaacgccagctcaaggacaagtttgacgggcgacccaccaagccacctccgaacagctactcgctgtactgcgcagagctcatggccaacatgaaggacgtgcccagcacagagcgcatggtgctgtgcagccagcagtggaagctgctgtcccagaaggagaaggacgcctatcacaagaagtgtgatcagaaaaagaaagattacgaggtggagctgctccgtttcctcgagagcctgcctgaggaggagcagcagcgggtcttgggggaagagaagatgctgaacatcaacaagaagcaggccaccagccccgcctccaagaagccagcccaggaagggggcaagggcggctccgagaagcccaagcggcccgtgtcggccatgttcatcttctcggaggagaaacggcggcagctgcaggaggagcggcctgagctctccgagagcgagctgacccgcctgctggcccgaatgtggaacgacctgtctgagaagaagaaggccaagtacaaggcccgagaggcggcgctcaaggctcagtcggagaggaagcccggcggggagcgcgaggaacggggcaagctgcccgagtcccccaaaagagctgaggagatctggcaacagagcgttatcggcgactacctggcccgcttcaagaatgaccgggtgaaggccttgaaagccatggaaatgacctggaataacatggaaaagaaggagaaactgatgtggattaagaaggcagccgaagaccaaaagcgatatgagagagagctgagtgagatgcgggcacctccagctgctacaaattcttccaagaagatgaaattccagggagaacccaagaagcctcccatgaacggttaccagaagttctcccaggagctgctgtccaatggggagctgaaccacctgccgctgaaggagcgcatggtggagatcggcagtcgctggcagcgcatctcccagagccagaaggagcactacaaaaagctggccgaggagcagcaaaagcagtacaaggtgcacctggacctctgggttaagagcctgtctccccaggaccgtgcagcatataaagagtacatctccaataaacgtaagagcatgaccaagctgcgaggcccaaaccccaaatccagccggactactctgcagtccaagtcggagtccgaggaggatgatgaagaggatgaggatgacgaggacgaggatgaagaagaggaagatgatgagaatggggactcctctgaagatggcggcgactcctctgagtccagcagcgaggacgagagcgaggatggggatgagaatgaagaggatgacgaggacgaagacgacgacgaggatgacgatgaggatgaagataatgagtccgagggcagcagctccagctcctcctcctcaggggactcctcagactctgactccaactgaggctcagccccaccccagggcagccagggagagcccaggagctcccctccccaactgaccacctttgtttctcccccatgttctgtcccttgcccccctggcctcccccactttctttctttctttaaaaaaaaaaaaaaatacggtgggggtagggggctggaggagcccaggccaggactctgcagcctcagagacatcagcccttgggggtcctcctccagggacagcaactatcagactaagccagcaccggaccagcctggcccaccccacccacttctgcacttgcggttccggcatggacaatggaccggagagtgggggtggggggtcccaaagagtttgatgaggccctccacacctgcggcccaatccaaggtggggtggaagcttggggaagacccattccttcccagaggggcctgccacctggacccctgcattggaactggaggcagggaacatggggaggaggagggtcggtgccttcaagaaaacaggcactgccctggtggccctctcccctgccccctgcaggaaggagctgcctggacccgttcatgggggagggggcagaagtgttttttatatatgtgtatatatttttttttaagctctgagctgtcaacgagacgtttcctaccgatctcggctgccgtctctgttgtcatttctgggagagggagggtttaggggtagatttggaaccttttaaaaatggtcttgatgtatgtggaagagagtatgtgtatgtgtgttcctgtacatagcatgggtgcagctgtggatgtgtgcaaaagagtgtgagtgtgtgtgtgtgtgtgtaaaggggtctgtcctagagcccacatcagtttgttgtgaatctggaaaaagggtcggtgagggccgggagatgttgaccctggtgggagcaggctgaggctgccccgttctccacatcctctgttttgcccagtctctgattccattagggggagtgtgctgaagccattctcggatgcttcccagaccaggctccctctgccagagtcacatgcatccgagctgctggtctccattgtccagcaggaaggcggaaaggcaggcaagatggtgtgaagcttaaagcttgtatttgatggaaaaggtctcccctgttcatctgagaggccaagcctggccaccccaggctcagaacctgggcttcaagaaatgtgctgggagctcctaacttacacatccctccagccttccttgaatcctcccaccaccccctatttcctttaatttctcaggtctgctccctcctcccccaaccccacagctgggcaagaagtctgcaaaagctgcatctgcagctgtctctaactcttcccagccatctcccgtattttttggtaccttgattccttgactcttaataagccaagccaccttatctctgtagttcttatttttttgttgactaaatttggggggttcttttttatggtcatgtcactgacctattaaattggggcttggtgcttttccaccttccccctctgaatgaaagccaaggaatgggggaagagcgggaactctgccgcggaggtggagcaagaacggtgaagggccctggtcccagagaggctggtgggtccctctcccaaaggaaggcagacagtctctgctttgccttggaccttggtgctgggggtggggaggcctgggggggacactccccactcccattccccttcctttgtcctaatcctggaattaagtacaggggtttataggttctatttcttcccaagagccctgcaaagaaccccagtttcctatttggatgcccctacactgttgtgtttcagtggaatgtattttcatttaaaaacaactttgaatggggcactttttctttcctgttttaaaaattgaaaaattcttacagtacaaacaggactgtcagggtgggggtgttggtgctgtaagaggtcactcttgagtgcattttggcactgggatgggatggctggggtgggaagacccccatccccacccccaacttcttttctaatatttaaggagtgttttgtaggattcaacaaccaccacaacttgaatttgtatcatgggaggtgggagggagtggcttagaggtgtctgcctatgcttaaagccaactgtggaagttttgttttcccttttttgtataataaagtgaaaaacaaaggtttgaaaaaaaaaaaaaaaaaaaaaaaaaaaaaaaaa

SEQ ID NO: 1133 - DNA, 4086 bp, Homo sapiens
ggccacttggcccgggcctcctttctcctctggtcgtggggaaggagggatgggttggaccttctgcttttctttcaattccctcttttcattctccttcctcctcaatcttcaacacttggctagtcgttaatgccttaagtgcttaatttgttgtgtctggtcctggccagggtctggctgtacaggaggactggaagggcatcctgggagtttcctggtgtccacaggccggacaaaagcaaccccgactccttagagcatggcatggctcagaggtgctggtaaaactgatgggggtttttgctgtccctcccctcagcgccgacaccatgtggatccaggttcggaccatggacgggaggcagacccacacggtggactcgctgtccaggctgaccaaggtggaggagctgaggcggaagatccaggagctgttccacgtggagccaggcctgcagaggctgttctacaggggcaaacagatggaggacggccataccctcttcgactacgaggtccgcctgaatgacaccatccagctcctggtccgccagagcctcgtgctcccccacagcaccaaggagcgggactccgagctctccgacaccgactccggctgctgcctgggccagagtgagtcagacaagtcctccacccacggtgaggcggccgccgagactgacagcaggccagccgatgaggacatgtgggatgagacggaattggggctgtacaaggtcaatgagtacgtcgatgctcgggacacgaacatgggggcgtggtttgaggcgcaggtggtcagggtgacgcggaaggccccctcccgggacgagccctgcagctccacgtccaggccggcgctggaggaggacgtcatttaccacgtgaaatacgacgactacccggagaacggcgtggtccagatgaactccagggacgtccgagcgcgcgcccgcaccatcatcaagtggcaggacctggaggtgggccaggtggtcatgctcaactacaaccccgacaaccccaaggagcggggcttctggtacgacgcggagatctccaggaagcgcgagaccaggacggcgcgggaactctacgccaacgtggtgctgggggatgattctctgaacgactgtcggatcatcttcgtggacgaagtcttcaagattgagcggccgggtgaagggagccccatggttgacaaccccatgagacggaagagcgggccgtcctgcaagcactgcaaggacgacgtgaacagactctgccgggtctgcgcctgccacctgtgcgggggccggcaggaccccgacaagcagctcatgtgcgatgagtgcgacatggccttccacatctactgcctggacccgcccctcagcagtgttcccagcgaggacgagtggtactgccctgagtgccggaatgatgccagcgaggtggtactggcgggagagcggctgagagagagcaagaagaaggcgaagatggcctcggccacatcgtcctcacagcgggactggggcaagggcatggcctgtgtgggccgcaccaaggaatgtaccatcgtcccgtccaaccactacggacccatcccggggatccccgtgggcaccatgtggcggttccgagtccaggtcagcgagtcgggtgtccatcggccccacgtggctggcatacacggccggagcaacgacggagcgtactccctagtcctggcggggggctatgaggatgatgtggaccatgggaattttttcacatacacgggtagtggtggtcgagatctttccggcaacaagaggaccgcggaacagtcttgtgatcagaaactcaccaacaccaacagggcgctggctctcaactgctttgctcccatcaatgaccaagaaggggccgaggccaaggactggcggtcggggaagccggtcagggtggtgcgcaatgtcaagggtggcaagaatagcaagtacgcccccgctgagggcaaccgctacgatggcatctacaaggttgtgaaatactggcccgagaaggggaagtccgggtttctcgtgtggcgctaccttctgcggagggacgatgatgagcctggcccttggacgaaggaggggaaggaccggatcaagaagctggggctgaccatgcagtatccagaaggctacctggaagccctggccaaccgagagcgagagaaggagaacagcaagagggaggaggaggagcagcaggaggggggcttcgcgtcccccaggacgggcaagggcaagtggaagcggaagtcggcaggaggtggcccgagcagggccgggtccccgcgccggacatccaagaaaaccaaggtggagccctacagtctcacggcccagcagagcagcctcatcagagaggacaagagcaacgccaagctgtggaatgaggtcctggcgtcactcaaggaccggccggcgagcggcagcccgttccagttgttcctgagtaaagtggaggagacgttccagtgtatctgctgtcaggagctggtgttccggcccatcacgaccgtgtgccagcacaacgtgtgcaaggactgcctggacagatcctttcgggcacaggtgttcagctgccctgcctgccgctacgacctgggccgcagctatgccatgcaggtgaaccagcctctgcagaccgtcctcaaccagctcttccccggctacggcaatggccggtgatctccaagcacttctcgacaggcgttttgctgaaaacgtgtcggagggctcgttcatcggcactgattttgttcttagtgggcttaacttaaacaggtagtgtttcctccgttccctaaaaaggtttgtcttcctttttttttttatttttatttttcaaatctatacattttcaggaatttatgtattctggctaaaagttggacttctcagtattgtgtttagttctttgaaaacataaaagcctgcaatttctcgacaaaacaacacaagattttttaaagatggaatcagaaactacgtggtgtggaggctgttgatgtttctggtgtcaagttctcagaagttgctgccaccaactctttaagaaggcgacaggatcagtccttctctcgggttctggcccccaaggtcagagcaagcatcttcctgacagcattttgtcatctaaagtccagtgacatggttccccgtggtggcccgtggcagcccgtggcatggcgtggctcagctgtctgttgaagttgttgcaaggaaaagaggaaacatctcgggcctagttcaaacctttgcctcaaagccatcccccaccagactgcttagcgtctgagatccgcgtgaaaagtcctctgcccacgagagcagggagttggggccacgcagaaatggcctcaaggggactctgctccacgtggggccaggcgtgtgactgacgctgtccgacgaaggcggccacggacggacgccagcacacgaagtcacgtgcaagtgcctttgattcgttccttctttctaaagacgacagtctttgttgttagcactgaattattgaaaatgtcaaccagattctagaaactgcggtcatccagttcttcctgacaccggatgggtgcttgggaaccgtttgagccttatagatcatttacattcaatttttttaactcagcaagtgagaacttacaagagggtttttttaaaatttttttttctcttaatgaacacattttctaaatgaattttttttgtagttactgtatatgtaccaagaaagatataacgttagggtttggttgtttttgtttttgtattttttttcttttgaaagggtttgttaatttttctaattttaccaaagtttgcagcctatacctcaataaaacagggatattttaaatcacatacctgcagacaaactggagcaatgttatttttaaagggtttttttcacctccttattcttagattattaatgtattagggaagaatgagacaattttgtgtaggctttttctaaagtccagtactttgtccagattttagattctcagaataaatgtttttcacagatagaaaaaaaaaaaaaaaaaaaaaa

SEQ ID NO: 1134 - DNA, 3720 bp, Homo sapiens
gcgagatccggcttggcgccgtgacctccatgtgggagctccagctctataagtaaacactctgcgcggcgcagacatggcctcttcctatctttgaggcggtgtctgcggcagcgcctcagagtggttccggtcgtctctcctcaagtcggctagtcgggcgcgcgcgctgagagtcgtcgccgcctgtcgggcccggcgtccggtcggtccggtgggcgcgctcgcccgcctgccgctgagggcccgagccgcagggaaagcggcgcgggccgggcggggcgcggcgcccagagctcagggggagacaaaggggaccggttcctctctaggcgccaagatgtggatacaggttcgcaccattgatggctccaagacgtgcaccattgaggacgtgtctcgcaaagccacgattgaggagctgcgcgagcgggtgtgggcgctgttcgacgtgcggcccgaatgccagcgcctcttctaccggggcaagcagttggaaaatggatataccttatttgattatgatgttggactgaatgatataattcagctgctagttcgcccagaccctgatcatcttcctggcacatctacacagattgaggctaaaccctgttctaatagtccacctaaagtaaagaaagctccgagggtaggaccttccaatcagccatctacatcagctcgtgcccgtcttattgatcctggctttggaatatataaggtaaatgaattggtggatgccagagatgtcggccttggtgcttggtttgaagcacacatacatagtgttactagagcttctgatggacagtcacgtggcaaaactccactgaagaatggcagttcttgtaaaaggactaatggaaatataaagcataaatccaaagagaacacaaataaattggacagtgtaccctctacgtctaattcagactgtgttgctgctgatgaagacgttatttaccatatccagtatgatgaatacccagaaagcggtactctagaaatgaatgtcaaggatcttagaccacgagctagaaccattttgaaatggaatgaactaaatgttggtgatgtggtaatggttaattataatgtagaaagtcctggacaaagaggattctggtttgatgcagaaattaccacattgaagacaatctcaaggaccaaaaaagaacttcgtgtgaaaattttcctggggggttctgaaggaacattaaatgactgcaagataatatctgtagatgaaatcttcaagattgagagacctggagcccatcccctttcatttgcagatggaaagtttttaaggcgaaatgaccctgaatgtgacctgtgtggtggagacccagaaaagaaatgtcattcttgctcctgtcgtgtatgtggtgggaaacatgaacccaacatgcagcttctgtgtgatgaatgtaatgtggcttatcatatttactgtctgaatccacctttggataaagtcccagaagaggaatactggtattgtccttcttgtaaaactgattccagtgaagttgtaaaggctggtgaaagactcaagatgagtaaaaagaaagcaaagatgccgtcagctagtactgaaagccgaagagactggggcaggggaatggcttgtgttggtcgtacgagagaatgtactattgtcccttctaatcattatggacccattcctggtattcctgttggatcaacttggagatttagagttcaggtgagcgaagcaggtgttcacagaccccatgttggtggaattcatggtcgaagtaatgatggggcttattctcttgtactggctggtggatttgcggatgaagtcttgacagagttatgaatatgaatattgtggagtctgtccagataccgggtggaagactggttttgatcagtttaagaagtattctaaactgttctagatgaccgaggtgatgagttcacatacactggaagcggtggtaaaaatcttgctggtaacaaaagaattggtgcaccttcagctgatcaaacattaacaaacatgaacagggcattggccctaaactgtgatgctccattggatgataaaattggagcagagtctcggaattggagagctggtaagccagtcagagtgatacgcagttttaaagggaggaagatcagcaaatatgctcctgaagaaggcaacagatatgatggcatttataaggtggtgaaatactggccagagatttcatcaagccatggattcttggtttggcgctatcttttaagaagagatgatgttgaacctgctccttggacctctgaaggaatagaacggtcaaggagattatgtctacgtttacagtatccagcaggttacccttcagataaagaagggaagaagcctaaaggacagtcaaagaagcagcccagtggaaccacaaaaaggccaatttcagatgatgactgtccaagtgcctccaaagtgtacaaagcatcagattcagcagaagcaattgaggcttttcaactaactcctcaacagcaacatctcatcagagaagattgtcaaaaccagaagctgtgggatgaagtgctttcacatcttgtggaaggaccaaattttctgaaaaaattggaacaatcttttatgtgcgtttgctgtcaggagctagtttaccagcctgtgacaactgagtgcttccacaatgtctgtaaagattgcctacagcgctcctttaaggcacaggttttctcctgccctgcttgccggcatgatcttggccagaattacatcatgattcccaatgagattctgcagactctacttgaccttttcttccctggctacagcaaaggacgatgatctgcctgctttcactgtgttgttcatggtggctttttggacaataaagaatctaaaatgggtggggagggtggaagaaatggtggactgtatctctcacgttctgaagcagctaatcctctttcccacatagccatcatcttgtgtgtgtagtaagaggcccatttctcaactgtcttttaaatatctaaaggtagttcctgtaacaactagttttaatgagtaaaaagtcaaagcctcagctctagttgatatccaagttatgatttattttgcaactacctcaggacagaaaagatttatggggattttaaaaatcattgaataactagttaaatgaaattttagctacacactgcctcccaaatattagttgtgcctggttcttgtaatttgattttacagaaaaggaaatgacacttgagatccttggaatgaacacagcttctaaagtgtgcatatacttttttaacgtctcttcttccattacaatgtgtgttttgcaaggacaggttcattttttttagcccactttgtgaactccattgtgcttttttctggtgttttatgcaagttgactactaatgactaatgagaacaataatgaatgcattgttgctgcattagtgtaatgtggtgtggttttgcacttaaaagaggtattcatatgctctagttgtaaatgttcatgaaaatccacttctctactagtcgaactgcttttagtgtctcaccagtggttttacatctgcagagttttgagggctgtgctgacctttgagaggatttgaaattgcttcatattgtgatcctaaattttatattcactatattccctaaagtataccttaataaatattttatgatcagaa

SEQ ID NO: 1135 - DNA, 1831 bp, Homo sapiens
aacatggccgcgggctggaagtgcgcatgagcagctgtctatggagatacctaggccgggagagggagaacacagttggagaaaatcggcagctgagacggccttggccggacttagcactcaggcctgtgaatcaggagatacaaagacctccaaaaaaggaccagttcctcggatgtgccccctcacagagagatgaaggggcagcagaaaacagctgaaacggaagaggggacagtgcagattcaggaaggtgcagtggctactggggaagacccaaccagtgtggctattgccagcatccagtcagctgccaccttccctgaccccaacgtcaagtacgtcttccgaactgagaatgggggccaggtgatgtacagggtgatccaggtgtctgaggggcagctggatggccaaactgagggaactggcgccatcagtggctaccctgccactcaatccatgacccaggcggtgatccagggtgctttcaccagtgatgatgcagttgacacggaggggacagctgctgagacgcactatacttacttccccagcacggcagtgggagatggggcagggggtaccacatcggggagtacagctgctgttgttactacccagggctcagaggcactgctggggcaggcgacccctcctggcactggtcaattctttgtgatgatgtcaccacaagaagtactgcagggaggaagccagcgctcaattgcccctaggactcacccttattccccgaagtcagaagctccccggacgactcgggatgagaaacgcagggctcagcataatgaagtggagcgtcgccgccgagacaagatcaacaactggatcgtgcagctctccaagataatcccagactgctctatggagagcaccaagtctggccagagtaaaggtgggattctatccaaagcttgtgattatatccaggagcttcggcagagtaaccaccgcttgtctgaagaactgcagggacttgaccaactgcagctggacaatgacgtgcttcgacaacaggtggaagatcttaaaaacaagaatctgctgcttcgagctcagttgcggcaccacggattagaggtcgtcatcaagaatgacagcaactaactatggggattcaggggctttgggcccaagaactgcagatagcccaggagcaacagcctaatcccgtgcccctttccttcactgccccacttctggcatgggacagggggaagttcagaaggtgtgtccttgaactgaggccctgtgatatggcggcctgcagtggtgtgaaacacacaatgtggacgtgcactgacagccttgcccacccccaccatgcagcccctgggcccttgtgctcctctcgcacaatgcatgtgctgtctccatgctggatactggacacactaaactctggggcttgtcctgtgcttgcttagagtgcccagcagaggtttgctgacaggtgatgctctggcttgccccaggactctggcacttccattggttcttcctttccctggagctgaggtttagatgtgcaacctgtggctcaggggagcaagcttacacaagaagtgagggaaggatgtttagcagtggctggtgcccatgaagaggagattggccagtgagaagctgaggcctatgcagacatctctggagccagagagaacaacaggcaggggcccacttggggccttcccccttgtgggggtcgttttttttttttcttttcttttttttttttttttttttttttttttaagataaaattgttcaaagccaaaaaaaaaaaaaaaaaaaaaaaaaaaaaaaaaaa

SEQ ID NO: 1136 - DNA, 1732 bp, Homo sapiens
gtgagcgccgggctcggggcccccccggccgcccgccccctcccctccctccctcccctcccctcccctcccccccgggccccgcgccccccccgcccccgccccccccatggacatgctggacccgggtctggatcccgctgcctcggccaccgctgctgccgccgccagccacgacaagggacccgaggcggaggagggcgtcgagctgcaggaaggcggggacggcccaggagcggaggagcagacagcggtggccatcaccagcgtccagcaggcggcgttcggcgaccacaacatccagtaccagttccgcacagagacaaatggaggacaggtgacataccgcgtagtccaggtgactgatggtcagctggacggccagggcgacacagctggcgccgtcagcgtcgtgtccaccgctgccttcgcgggggggcagcaggctgtgacccaggtgggtgtggacggggcagcccagcgcccgggccccgccgctgcctctgtgcccccaggtcctgcagcgcccttcccgctggctgtgatccaaaatcccttcagcaatggtggcagtccggcggccgaggctgtcagcggggaggcacgatttgcctatttcccagcgtccagtgtgggagatactacggctgtgtccgtacagaccacagaccagagcttgcaggctggaggccagttctacgtcatgatgacgccccaggatgtgcttcagacaggaacacagaggacgatcgccccccggacacacccttactctccaaaaattgatggaaccagaacaccccgagatgagaggagaagagcccagcacaacgaagtggagcggaggcggagggacaagatcaacaactggatcgtccagctttcgaaaatcattccagactgtaacgcagacaacagcaagacgggagcgagtaaaggagggatcctgtccaaggcctgcgattacatccgggagttgcgccagaccaaccagcgcatgcaggagaccttcaaagaggccgagcggctgcagatggacaacgagctcctgaggcagcagatcgaggagctgaagaatgagaacgccctgcttcgagcccagctgcagcagcacaacctggagatggtgggcgagggcacccggcagtgacgcccgccaccaccacgcagccgccgccgcccacgccggcctctgctgcccccttccccagcccttagcacagagagggacacatgcccctcccccagctgcgtttttttatagtagatttttaacaaaaaacggggagaaataatgcatttctgtggatacagtgcccaccgccctcctccacttggaaacggtatcctccctgcccatccgtctgtctgtcgcccttctcccggccctcactaagccccggcacttctagtggtctcacctggaggcaagagggaggggacagaggccctgccacgtcccgctgcctcctgctctctggaggtactgagacagggtgctgatgggaaggaggggagcctttggggggccacccggggcctggacctatgcagggaggccacgtcccaccccacctcttgtttctgggtccctgctcccctttgggggtgtgtgtgtgtgttttaattttctttatggaaaaattgacaaaaaaaaaatagagagagaggtatttaactgcaataaactggccccatgtggcccccgcaaaaaaaaaaaaaaaaaaaaaaa

SEQ ID NO: 1137 - DNA, 1157 bp, Homo sapiens
cgccccagccccgggatgctgctccggccccgcaggccgcccccgctcgcgccccccgcgccgccctcgcccgccagccccgaccccgagccgcggacacccggagacgccccggggaccccgccccggaggcccgcctcgcccagcgcgctgggggaactcgggttgccggtgtccccgggctcggcgcagcgcacgccctggagcgcccgggagacggagctgctgctggggacgctgctgcaaccggccgtgtggcgcgcgctgctcctggaccgccgccaggccctgcccacctaccgccgcgtgtcggccgcgctggcccagcagcaggtgcgccgcacccccgcgcagtgccgccgccgctacaagttccttaaagacaagtttcgcgaggcgcacggccagccgcccgggcccttcgacgagcagatccggaagctcatggggctgctgggcgacaacgggcgcaaacggcctcgccgccgctccccggggtccgggcgcccccagcgcgcccgccgcccggtccccaacgcgcacgcgccggctcccagcgaaccagacgccaccccgctgcccaccgcccgcgaccgcgacgcggaccccacctggacgctccgcttcagcccgtccccaccgaagtctgcggacgcctcccccgcccccggctccccgccagctcccgccccgaccgccctcgccacctgcatccccgaggaccgcgcgcccgtccgcggccccgggtccccgccgccacccccggcccgcgaagaccccgactcgccgcccggccgccccgaggactgcgcgccccctccggccgcgcccccgtcgctgaacaccgccctgctgcagaccctggggcacctgggcgacatcgcgaacatcctgggcccgctgcgcgaccagctgctgaccttgaaccagcacgtggagcagctgcgcggcgccttcgaccagacagtgtccctggccgtgggcttcattctgggcagcgcggccgccgagcgaggggtcctcagggacccgtgccagtgagtcccggctgcggccagtctcccctctccaggccgaggcccctccgccctgacccctcctgctgccttcccacccccgttcttgggtatgttcaataaaaggattgttttcctaga

SEQ ID NO: 1138 - DNA, 4494 bp, Homo sapiens
accagactggccgcctctcggcgagcgcgccactctcccgtcgccgctgacccgcgcgcggccgccgaagcctccccgcggggacattcattcttgccccttgcctgtcgccgggccgggcgtacgggccgcgttgtcgggggttttgtcccctttttcctcttttttttttccttctccgccccccccccttttttttttttttgctttttttttcctttctgtttttgttgttgttcttgcctatgttcgggaaaccagacaaaatggacgttcgatgccactcggacgccgaggctgcccgggtctcgaagaacgcgcacaaggagagtcgggagagcaagggcgcggaggggaacctcccagccgccttcctcaaggagccgcagggcgccttctcagcgtcgggcgctgctgaggattgtaacaaaagtaaatccaattccgcagcggacccggattactgccgccggatcctggtccgagatgccaaggggtccatccgagagatcatcctgcccaagggcctggacttggaccggcctaagaggacgcgcacgtccttcaccgcggagcagctctatcggctggagatggagttccagcgctgccagtacgtggtgggccgcgagaggaccgagctcgcccggcagcttaacctctccgagacccaggcaaatagtgaagaaaataatgaacgattcaaacgcgggataaaaaaacaaaagaagaaaaggaagaaagagccagcaaatgatgagtctcggcgtggggactccgggggcagagggtggcagcccctatagtgcggggccctgcgactggtaccgtgagcgcctgggatgaggtttgggcggatttcgggtttccggagaggcagagacgcctggctacgacgatttgttccacttccttgagtgtttcgctctcgatttctctatctgtccctctgaggtcggcccctcagaccctcctccttaatttcccactgcgtaattcttagtttatttaggaactcatctctgggcactataaagtctctgcctcctaatgctaggtttctagagtcttccagctgcatcttcatgccggcagcattttggattttgtgcaatcatgggcccagaataggcaaggttttattttcttctgacttagaatataagtctcgccatcgtcaaagagaaactttgaaggagcaggagactgaaatcgatattaattcctgcaaagagacctcctcaccctggtgcttatgcggtggtgacgggtgtagacgttgcaaacaaatcttgggaagcgaggagggccggggaggacacttccggacacgctcttctaaagcgtgtgcagcacggggcgaagtccgcgctgcgggggcagcggccccggctccttcttgtagcgcctgcacacctgggtgttgcagggacccgcagctcccgtgcggcaccggccctagccaggccttactgcccctactcgtgtactgtgcctgaagctgaagttggaggcatccaaaataaggcggggcacagtgtgggcggcggagtccctgagccttgagctccgctttttgctgagatcacagcagccgcccacagacagttcacttttatttctcaaagttgctgcagatccctcagcttggcttctcttggctcttcccctccctgtccgcctctccttactttctcttgcttgaaactgcttttccttttctactcttttcttccgcgctcctgtcccgtaaacgcctgcgcttcctttaaggagttctctctctgtggtgtgggctcccctctcgttccccctgtctccctcctccattacttcttccttccaggtctctctctctcttttggttttctggtttttttctcctgctcaaggggtcccaaaggccaaggcagtgggtggctctcgctgcagcttcaaggctggtggctgggaccctccaggggtgagaaggaagggagaaggtggcataactttttggaacaaaagaaaacacaaaatcctagcttgggattcccaacaaattcagcctcctctcccaggggcctcagcctgggaagtcaccaagcagatccctccttccagcttcctgctctttctcctttttgctttcttacccctgaaagagggaaggacaagtcacctcataacttctgctctcacctcccttccctccctggctttgggaagagctgctgagctctttgcctgccactcagggagtgcaattgttcttaaagagcctcttctgcatagaaaaagaattgcaattttaatttaaaaacatttatagaaaattcatttaattttagtgactatcttcttttccctccttccccaagggcctccagtaagctgccttggtccctggaggcttctggcttccaactggagactcacaggccttggaggaggaggcaggtaccctctatgccaatagctgggcctgcctggggaaaggtggaaggagaaacagctgcaggaggggggagctgaaaggaatctgatgctcaggcctgcacaaagcaaccgccaaattgtttcagagcagaaaagaaaaagggagaaaacctcttagcaaagccctgtgagtttgggggtcaggttcaagaaagatgtgggaagtcacttggagagctaaacgggacacatgctcctatccacacttgcagttggtctaaccttcagccagaatgtattcataagtagcatttggcaaccctttatagtttacaaatagcattttacatacaccattctactattcctcatggtggctttgggaggtccagctccgttttaaagactcacacaggactgaagcaaataacttgctcaaagccacatagctgctcagaacccaagattgtaagctccccctagggccagaggcctctttctttcagtttttttctttcgtccccctttgacccctctttccttcttccctttctcccctccttcctcctttccttctttttgtgcccacagtgtctggatcatggtacctgaattctttagcctatttgcacccacatctgctaatgtccatatctagccatctattacaccagctgctgaggatttacttggtgccctcatcaagaagtttgaatttctccctccttcctttttttttcctgccactgtcccaactctttccctctacgtctctctagaatgacatctttaaaccccttacactctttggtcttacacatccttaaaaatgattatttataaattgaattataatatccatgaggtaaacactcatagggtaaagtacacaaagcttaactatacaagttgatgatttacacacacacacacacacacacacacacaccccttcttgaatggctccaaggatacccttttaacttcttcccttcagccacataagccatatgatgacacacagtgtctttctcctgtttgaaaagaaattgtgtcatattggtgtgctgttcttgcatagaaagccttttttaagaagtctttttaagatttcttgaaggattttagaaatcatatatctcttctaaccccctgaaatcctgagtttaagtggcttgattaaatggctgatcaaaacttaaaaacacactaggtcaatgtttttcaagatacaactgaggaccagctgcttcagaatcatctggggactggctaaaattccaggttcctaagccctagtcccatctgatgaatcagaaactaggttggggcttaggaacgtgcattttaaacacttttccaaagtgattcttatccagactaatatttgagaagtactgtattaaatggcaaactcccaaaacactgcagcctcctgcatctggcccagggcctggcatttggtaggaatacaatgaatgtttgttaaacaaattaatccacagtttctgacacagtttagaatttcttggaccacattatgctattgtaatttaacaccatttctacgtcgggaaatctttacatttcagtctttttcattttcatggaggtttcattttaatggagcaggagagaaaagagagatctactttggtggtttctcaggtctcagggaaggtcttttataaactcaatggggaccaccttcctggagaggctgctcccttacagacctggtagtttggggaaaggaggaggagagcccttcaggtttgctgaaaagcattcagatgcacacccttcttggttggaactgaaagcttctgtttgaagagacatgagttctggaaggagcaaggccaccaggtccagagaacctggcatgcaatggacatggaagctgaaaattacttgggtattctctgatttctagctaatatgaaaataattttctttctagaaacacatttgcctatcttcttaccctgaaacagaaaataaatattgtgctttatgtggtagtgttgtacccattcttaaaaataaatcacatcatatatatgtgtaaaatat

SEQ ID NO: 1139 - DNA, 1163 bp, Homo sapiens
ccgccgtagaggggttggcagtggcggtcagcatgggcgatgggggcgccgagcgcgaccggggccccgcgcgccgggcggagtctggtggcggcggtgggcgctgcggagaccgcagcggagcgggggacttgcgagctgatggcggtggccacagcccaacggaggtggccgggacctcagcctccagtcccgcaggctccagggagagtggagccgacagcgacgggcagcccgggcccggcgaggcagaccactgccgccgcatactggtgcgagatgccaaagggacaattcgggaaattgtcctgcctaagggcctggacctggaccggcccaagcggacacgtacatccttcactgccgagcagctgtaccgcctggagatggagttccagcgctgccagtatgtggtgggccgcgagcgcactgagctggcccgccagctgaacctctccgagacccaggtgaaggtctggttccagaaccgccgcaccaagcagaagaaagaccagagcagagacctggagaagcgggcgtcctcctcagcctccgaggcctttgccacctccaacattctgcggctgctggagcagggccggctgctctctgtgcccagggcccctagcctcctggcgctgacccctagcctgccaggcctacctgccagccacaggggcacctccttaggtgaccccaggaactcctccccacgcctcaacccgctgtcctcggcctcagcgtcccccccactgccgccccctctgccagctgtctgcttttcctcggccccgctcctggatctgcctgccggctacgaactgggttcctcggccttcgagccatacagctggctagaacggaaagtgggcagcgccagcagctgcaagaaagctaacacttaagactcccaccctgtgacactgagtcccgagcacagcaccttcccagtctcctgtgccccagcggacagcactgagcaggccccggagaggaggggctgcagccacacactcttccccacctgccccccagctcagagactcgtgaccaaatggccttggtcccgcagcttgtgtgcgtgagtgcagtgtgagtgtgtgtgtctctcactgaaataaaaggaaaacaatgacaagaagggaaaaaaaaaaaaaaaaaaa

SEQ ID NO: 1140 - DNA, 4669 bp, Homo sapiens
ctgcttgtcaaaaggcggcagcggagccgtgtgcgccgggagcgcggaacagcttgtccacccgccggccggaccagaagcctttgggtctgaagtgtctgtgagacctcacagaagagcacccctgggctccacttacctgccccctgctccttcagggatggaggcaatggcggccagcacttccctgcctgaccctggagactttgaccggaacgtgccccggatctgtggggtgtgtggagaccgagccactggctttcacttcaatgctatgacctgtgaaggctgcaaaggcttcttcaggcgaagcatgaagcggaaggcactattcacctgccccttcaacggggactgccgcatcaccaaggacaaccgacgccactgccaggcctgccggctcaaacgctgtgtggacatcggcatgatgaaggagttcattctgacagatgaggaagtgcagaggaagcgggagatgatcctgaagcggaaggaggaggaggccttgaaggacagtctgcggcccaagctgtctgaggagcagcagcgcatcattgccatactgctggacgcccaccataagacctacgaccccacctactccgacttctgccagttccggcctccagttcgtgtgaatgatggtggagggagccatccttccaggcccaactccagacacactcccagcttctctggggactcctcctcctcctgctcagatcactgtatcacctcttcagacatgatggactcgtccagcttctccaatctggatctgagtgaagaagattcagatgacccttctgtgaccctagagctgtcccagctctccatgctgccccacctggctgacctggtcagttacagcatccaaaaggtcattggctttgctaagatgataccaggattcagagacctcacctctgaggaccagatcgtactgctgaagtcaagtgccattgaggtcatcatgttgcgctccaatgagtccttcaccatggacgacatgtcctggacctgtggcaaccaagactacaagtaccgcgtcagtgacgtgaccaaagccggacacagcctggagctgattgagcccctcatcaagttccaggtgggactgaagaagctgaacttgcatgaggaggagcatgtcctgctcatggccatctgcatcgtctccccagatcgtcctggggtgcaggacgccgcgctgattgaggccatccaggaccgcctgtccaacacactgcagacgtacatccgctgccgccacccgcccccgggcagccacctgctctatgccaagatgatccagaagctagccgacctgcgcagcctcaatgaggagcactccaagcagtaccgctgcctctccttccagcctgagtgcagcatgaagctaacgccccttgtgctcgaagtgtttggcaatgagatctcctgactaggacagcctgtggcggtgcctgggtggggctgctcctccagggccacgtgccaggcccggggctggcggctactcagcagccctcctcaccccgtctggggttcagcccctcctctgccacctcccctatccacccagcccattctctctcctgtccaacctaacccctttcctgcgggcttttccccggtcccttgagacctcagccatgaggagttgctgtttgtttgacaaagaaacccaagtgggggcagagggcagaggctggaggcagggccttgcccagagatgcctccaccgctgcctaagtggctgctgactgatgttgagggaacagacaggagaaatgcatccattcctcagggacagagacacctgcacctccccccactgcaggccccgcttgtccagcgcctagtggggtctccctctcctgcctactcacgataaataatcggcccacagctcccaccccacccccttcagtgcccaccaacatcccattgccctggttatattctcacgggcagtagctgtggtgaggtgggttttcttcccatcactggagcaccaggcacgaacccacctgctgagagacccaaggaggaaaaacagacaaaaacagcctcacagaagaatatgacagctgtccctgtcaccaagctcacagttcctcgccctgggtctaaggggttggttgaggtggaagccctccttccacggatccatgtagcaggactgaattgtccccagtttgcagaaaagcacctgccgacctcgtcctccccctgccagtgccttacctcctgcccaggagagccagccctccctgtcctcctcggatcaccgagagtagccgagagcctgctcccccaccccctccccaggggagagggtctggagaagcagtgagccgcatcttctccatctggcagggtgggatggaggagaagaattttcagaccccagcggctgagtcatgatctccctgccgcctcaatgtggttgcaaggccgctgttcacccacagggctaagagctagcgctgccgcaccccagagtgtgggaagggagagcggggcagtctcgggtggctagtcagagagagtgtttgggggttccgtgatgtagggtaaggtgccttcttattctcactccaccacccaaaagtcaaaaggtgcctgtgaggcaggggcggagtgatacaacttcaagtgcatgctctctgcagccagcccagcccagctggtgggaagcgtctgtccgtttactccaaggtggggtctttgtgagagtgagctgtaggtgtgcgggaccggtacagaaaggcgttcttcgaggtggatcacagaggcttcttcagatcagtgcttgagtttggggaatgcggccgcattccctgagtcaccaggaatgttaaagtcagtgggaacgtgactgccccaactcctggaagctgtgtccttgcacctgcatccgtagttccctgaaaacccagagaggaatcagacttcacactgcaagagccttggtgtccacctggccccatgtctctcagaattcttcaggtggaaaaacatctgaaagccacgttccttactgcagaatagcatatatatcgcttaatcttaaatttattagatatgagttgttttcagactcagactccatttgtattatagtctaatatacagggtagcaggtaccactgatttggagatatttatggggggagaacttacattgtgaaacttctgtacattaattattattgctgttgttattttacaagggtctagggagagacccttgtttgattttagctgcagaacgtattggtccagcttgctcttcagtgggagaaaacacttgtaagttgctaaacgagtcaatcccctcattcaggaaaactgacagaggagggcgtgactcacccaagcatatataactagctagaagtgggccaggacaggcccggcgcggtggctcacgcctgtaatcccagcagtttgggaggtcgaggtaggtggatcacctgaggtcgggagttcgagaccaacctgaccaacatggagaaaccctgtctctattaaaaatacaaaaaaaaaaaaaaaaaaaatagccgggcatggtggcgcaagcctgtaatcccagctactcaggaggctgaggcagaagaattgaacccaggaggtggaggttgcagtgagctgagatcgtgccgttactctccaacctggacaacaagagcgaaactccgtcttagaagtggaccaggacaggaccagattttggagtcatggtccggtgtccttttcactacaccatgtttgagctcagacccccactctcattccccaggtggctgacccagtccctgggggaagccctggatttcagaaagagcaagtctggatctgggaccctttccttccttccctggcttgtaactccaccaacccatcagaaggagaaggaaggagactcacctctgcctcaatgtgaatcagaccctaccccaccacgatgtggccctggcctgctgggctctccacctcagccttggataatgctgttgcctcatctataacatgcatttgtctttgtaatgtcaccaccttcccagctctccctctggccctgccttcttcggggaactcctggaaatatcagttactcagccctgggccccaccacctaggccactcctccaaaggaagtctaggagctgggaggaaaagaaaagaggggaaaatgagtttttatggggctgaacggggagaaaaggtcatcatcgattctactttagaatgagagtgtgaaatagacatttgtaaatgtaaaacttttaaggtatatcattataactgaaggagaaggtgccccaaaatgcaagattttccacaagattcccagagacaggaaaatcctctggctggctaactggaagcatgtaggagaatccaagcgaggtcaacagagaaggcaggaatgtgtggcagatttagtgaaagctagagatatggcagcgaaaggatgtaaacagtgcctgctgaatgatttccaaagagaaaaaaagtttgccagaagtttgtcaagtcaaccaatgtagaaagctttgcttatggtaataaaaatggctcatacttatatagcacttactttgttgcaagtactgctgtaaataaatgctttatgcaaaccaaaaaaaaaaaaaaaaaa

SEQ ID NO: 1141 - DNA, 2428 bp, Homo sapiens
acctggccgccatgcgcctctcctcctccccacctcgtggcccgcagcagctctccagctttggctccgtggactggctctcccagagcagctgctcagggccgacccacacccccaggcctgccgacttctccctggggagcctccctggcccaggccagacatccggcgcccgggagccccctcaggccgtcagcatcaaggaggccgccgggtcctcaaatctgcctgcgccggagaggaccatggccgggttgagtaaggagccaaataccttgcgggccccccgtgtccgcacagccttcaccatggagcaggtccgcaccttggagggcgtcttccagcaccaccagtacctgagccctctggagcggaagaggctggccagggagatgcagctctcagaggtccagataaaaacctggtttcagaatcgccgcatgaaacacaaacggcaaatgcaggacccccagctgcacagccccttctcggggtctctccatgcgcccccagctttctactcaacgtcttctggccttgccaatggcctgcagctgctgtgcccttgggcacccctgtccgggccccaggctctgatgctgccccctggctccttctggggtctctgccaagtggcacaagaggccctggcatctgcgggagcttcctgctgcgggcagcctctggcgtcccacccccctaccccaggccggccttcgctgggaccagccctgtccacggggccccggggcctgtgtgctatgccacagacgggggatgcattttgaggaggcacctctgactcccacactcgcggtcttgctgatcgcacctggctcctacctggaggactcagttgttctgtttacatcctggtggcacctctcaccctgacccacacaaaggttctggagattactggagaatatatataaatatatatatgtacgtatatatgtaaatacacatatacgtatatataaatatatatatacatatgtgtgtgtatatatatatatatttttttttttttttttttttttgagacggagtgttgctctgtcacccaggctggagtgcaatgacgcaatctcggctcactgcaacctccgcctcctgggttcaagcgattctccagcctcagcctcccgagtagctgggattacagacacccgccaccacgcccggctaattttttctatttttagtagaaatggggtttcaccatgttagccaggctggtctcaaactcctgaccctgtgatccgcccgcctcggcctcccaaagtgctgggattacaggcatgagccactgcacccggccctgagaatatatttattaaagccacctcttcactgaaagttaccgaaagagtcggtttaggaaggaaacgaagggtcagtgaacagagtcaaatgcagaagtgggcttgtcatgggtagggctttcggcgtacgataaaaggatcatttgttttttaaaaggggttggaaaaactggttttccagttggaaacagtaaaggttgtaagctttgtgtgtacaaaagaaaacagggaatgcaggtgtgtttatagcgttgtggttcaagtccctcttaacaagaactccaaagctggaaagcaggagggaacaaaggtgaacatgaaggcgaggatgctggggccctgcagtgcgctctaggctgtgcgtgagccgggactgtacccacagcttgctgagggctgctcttcttgggccagggaaagcagggcagccgggacctgcggctgtgcctggactgaagctgtcccgcaggtccccaccctccaacacgtgctcacctgtccccctcctcgcagcagcctcgggacaaaacaatgactcaaggacagcacttctcgcagaaggtctggaagtgcccagaatgggaggcacggaagcccctcccggggaggactcccgcgttgatggaccgttcttggtgcagactcctgactgcgtgcatgaaacctgagacaagtgcaattccttccatgtcgccccagagtgcccaggaggcaggcagtgcggggtgcccaggcagacgggttcagcctgcagaactggaggcgacctgtgaaacccacccgggcaccccaacaggaacagaagcgtggtcctgcggctgcgtccccagcgagtttcactttccccttgctcgtttctcccttgttgtaagtgtttacaactggcatgtgcttttaaacgtcaggtaagaggggaacagctgctgtacatcgtcctggcgagtgacaatgtgacagaagcctgggcgaggccctcggagggcagcagctggacaggggctactgggtttggcctggacagcactgatttgtggatgtggatgggggcacgttgtccgtgataaaagtacaagtgcccctcacaaaaaaaaaaaaaaaaa

SEQ ID NO: 1142 - DNA, 1608 bp, Homo sapiens
cagtgagttagcatggagggcagtgggaccggaaaaagacgtggaaaagctgcgaaaacgagccttcgaatcatggacgcgcgggcccagctcctcctccgagttcctcatccggggccgtcactcacatccggggccctcactcacatccgggaccctcatccggggctctcacccacatccgggaccctcatgcctgggcggaggagggggggccctcattcgggaccctgcactccgtcgccggaagtgccaccgagaagcgccggcctcggggctgtctacagcggcccgggagaggctgtggtggccccgagcgcgagtgtgtaggtgacaggacagcggccaggcccgcccctcccctcgtgatggtcattgtcctccagagcagtgatggaggaaataccagcccaggaagcagcagggtcaccaagggtccagtttcagtctttggagacccagtctgagtgtctgtccccagagcctcagtttgtgcaggacaccgacatggaacagggactcactggggctccacctgttcctcaggtgcctgctcttccccgtgagggaagcccaggagaccaggcagctgcgctcttgacagccaggtaccaggagtttgtgacattcgaggatgtggctgtgcaccttactcgagaggaatggggatacctggaccctgttcagagggacctctacagagaagtgatgttagagaattatgggaacgtggtctcactgggcatacttctccgccttcccaccacccggattcatagtgtgaattcctgcccggccctgagtcatacccaggcaagtgctttctctggagaaacacttgccgtccttacagcaggaatctccaagagatggcccaagtatcggcttcccatcgatattgctcgtccctgctcggaaactccttttccacgattgtgagatattaaaattgactgatggaatagaagctccccaggatgccaccactgtgtaaaatcgcagctcctcaaattacctctgtttaatttcaaatgttagggtccaaggaagccctctgttgcaaccagatatgttttgaacccagttcattcagaaaccatggttggtggtcatcatctacttgtattgtgaaaaaccagaaattccaaattcagctcttcagttatggtcttttcatattattttagaatgtgaaacttatgctgtgtgcccctccttttatgtggcgaacacaacctgccccgtatggtgcctaactctcctgtgaaccctgggcttccctcatgtttaacattctggtttcctccttccttgaagtccctgtggccctcttcaaggtcctaccttcctaccctttattctttgtggttctgtacagattgatgcaattatattgcctttcctgattaagtgttccttactctgtccttgatggaggggagaagggagggcaaagaagttaaatttatttcagggcatcaaattgaatatctacttaataactttgtaaactgtaaagtgacatacatataattgtaaagtactgttaattttatctaataattacagagtttccaacagttaaaaaaaaaaaaaaaaaaaaaaaaa

SEQ ID NO: 1143 - DNA, 4096 bp, Homo sapiens
attatcctccttattgacaaacagagcggtcgcggcggcgactctcggcgtgcggtgatagccaagccatgggagacaagaagagccccaccaggccgaagcggcagccgaagccgtcctcggatgagggttactgggactgtagcgtctgcaccttccggaacagcgccgaggccttcaagtgcatgatgtgcgatgtgcggaagggcacctccacccggaaacctcgacctgtctcccagttggttgcacagcaggttactcagcagtttgtgcctcctacacagtcaaagaaagagaaaaaagataaagtagaaaaagaaaaaagtgaaaaggaaacaactagcaaaaagaatagccataagaaaaccaggccaagattgaaaaatgtggatcggagtagtgctcagcatttggaagttactgttggagatctgacagtcattattacagactttaaggagaaaacaaagtcaccgcctgcatctagtgctgcttctgcagatcaacacagtcaaagcggctctagctctgataacacagagagaggaatgtccaggtcatcttcacccagaggagaagcctcatcattgaatggagaatctcattaaagtttattttctccaatttcttagtcacttctgtcctaccatgcaaatacacagattatgccaagaggtaccacattttcatgacagatacattcatgcacaatccataatttgagttttacataaaatagaaatttgttagaatttgttagattttattgcaatgatgcctaccaaacatttccagacttaacattttggtctctgcagttaagtgccatgaaaatgtggttgaattattcattatgcagtgttattggtaagtgtattttcacttttagtttagtgaattctaacacataattcttgaattctctactattggcatgtaacgaatttaaattttttataacatagtgcaagctgcctaaatatgtattatttgagaattgtgaaacagatagttatatgtatacaagtcaaagaacaacttaactattgctgcaacaggtttttcttaatggttatcctcttaaatacacctgctggtacttggtgtggttaaataggaaaattgttattaaataaagaatttgtatgaacctttgccaatgtttttgacacgttttactaattattgttcctgaattatgtttctggttttatctattttttgaggtttttttgtttgcttatttttcaaaacattcatttattgtaatgtttactagcggactagtaaacaataaaacattgattatttagctttataattcaggtttagtgctattgtcattgaacactggtattttctgtatcatataaaacattaaaattcaaataattataagcatttggcaaaaacaagagaaaagaaacttgccatattttacaagctgcaattttagaaaagctttaacttaatgatagttttatcattgttttcttgtcccaaacttatccagggccatagaagtatgaatctaattaaaacagaaatgggaattattgcacagaaatgggaaataactaattttaaatcagtcaaattggcttcttattaaatacaataattcttatgaaaatcatagtaccctattttcagacacagctgccagtttacacatttctcagtatcctgaaaggaaaaaagtatagccccacttatactatgtaaaattaccaataaaatatttttatgactacagattttgcatttttgtttacaactatttaaagagttttatgttgtatttagaatttcaacctagaaaccacacagtacttaaattctcctggggtctcctgctttctcttaaccatttgcttaatatatatctacctaaaggagacttctgaattgtaaatgaacttaaaaatagaatgtggatgcaaaatatcacataagacatcatgataacatttgaagaaaaaataaaactgtagaccctaacagttgtgatatttggtggtttcatgtggtaatgtaattttctgtttaattacagtactttttacaggcacagtggtactgtcttttttgtaagatgctagttgtgaaatacaattaattgcatacagtaaaagtctgtgattaaaacatttatatacctcattctttagtgttgttaaatgaaaaattaaaatttgtgtttattataagatactttcaatggaataccagctaaccagatatgttcctttaaaacatgaatttttttgtcttattctgtttttaacatgtttcaaatgttttatacatttttggagatagtaaaaatttaaaaatgtaatagggaaaatatttaatttttaagtcaaaaactatgctttaaaggaattacatcttatgatcaaataactttcaggatgtattttaaatgagctgcaagagagaaaaatctgacaggagatgggattttacctgaatggagcatactcatatttctacataggtgggaagatactcatctttctacatagacgggaacacggtgtagcatggagattaagcgtgctaactgacacctcatgtttgaatcctgttgtagaatggaaatgagcttaaattacccaagcttactttccatctataaaacagggctaataatggtaatcacatctaatttatagggtttttgggaggattaagtcaatccgtgtaaaattcttaattatctgacacatactggtcactcagtaaatgtgagcttttaccattgttataggtaaaatcccattacaaaaatacaaaaatattttttgtaacagttattttcctgccctcttggatgacctaaagtaatagtgttttatagatttcactaaattttcagtgtaatatcagatgttttctctggatgcagaaagaccatctttccataattaaagaacctggtgggtgtgcactatgagattggagaaatgaattaagttgacttgaaattattttacttttattaatcacaggtatctcaacctgcctttgtttcaccctacttcaagtacacttccacaccaggaaaacagacccaaattccataaacagaactgacgttaaaatatgcgaaagattcagaacctaggtttagggtacatgtttttctctgtttcatgaacttacagtgtggtttgagcactgggttcttttagccaaattccatacaaaaagaatttggatgttttccagcatttattaccttactttgctataagtaagagtgaagataggccgggtgtgatggctcatgccagtaatcccagcactttgggctgaagcaggcagatattttgagcccaggaccagcctgggcaacatggtgaaagctcatctctatgaaaaaatttgaatatacatatatatatatatgtatatttaaaaagtgaatataatttgaggcacagaagaatattcttaaaaccttttgtattatacaatagaaataaaggttttatttttattaaatgctttcctaaaatgatagtggataatagacaaagtgaaaacatttaaaaaggaagagaaacttcagcctttctaagttgatagcatgtttattaacttttagataaagatccttatagactgaaagaatgtagcctctgcattaatggtaaatggtctagaagttttcgtttccactgaggcttccgccactcgcttttttaaacttcctgctatggtttggatatggtttgtcctcaccaaaactcatgctgaggcctgagtccccagtttgattgtgttggtaggtggtgcctttaagaggtgattaggtcattgagatggattaaaggctttctcatgaggctcagttagttctggaatggattcgctcttgcaggaatggatgaattctcacaagagtgggttgttatgaagtgaggatgcttcttgtgttctgttctctttgccctcctcagttcaccatctgctttccaccatgagttgaagcagcatgaggccctcatcagatgggctccctgatcttggactcctcagcctttggactcataagccaaaataaatctgttttctttataaa

SEQ ID NO: 1144 - DNA, 1606 bp, Homo sapiens
gagccggggggaggggccggggcggtggcggctgtggccggtactggacccggcgggatgagcgaggtggaggcggcagcgggggctacagcggtccccgcggcgacggtgcccgcgacggcggcaggggtggtagcggtggtggtaccggtgcccgcaggggagccgcagaaaggcggcggggcgggcggcgggggcggagccgcctcgggccccgctgctgggaccccctcggcgccgggctcccgcacccctggcaatccggcgacggcggtctcgggaacccccgcccccccggcccggagtcaggcggacaagccggtgctggcaatccaagtcctgggcactgtcaaatggttcaacgtccggaatggttacggattcatcaacaggaatgacaccaaggaagatgtctttgttcaccagacagctattaaaagaaacaaccccaggaagtttctgcgcagcgttggagatggggagactgtggaatttgatgtcgtggaaggagagaagggcgcagaagccactaatgtaactgggcctgggggagtacccgtgaagggcagccgttatgcccccaaccgacgtaagtcccgccgattcatcccccggcctccctcagttgccccaccacccatggtggcagagatcccctcggcggggacaggacctggcagtaaaggggagcgggctgaagactctgggcaacggccccgacgatggtgccccccacccttcttctaccgacggcggtttgtgcgaggcccccggcctcccaaccagcagcagcctatagagggcactgacagggtagaacccaaagagacagccccattggaggggcaccaacagcagggagatgagcgagtccccccgcccagattccggcccaggtaccgaaggcctttccgccccaggccacgccagcagcctaccacagaaggtggggatggtgagaccaagcccagccaaggtcccgctgatggttcccggcctgagccccagcgcccacgaaaccgcccctacttccagcggagacggcagcaggcccctggcccccagcaggcccctggcccccggcagcccgcagcccctgagacctcagcccctgtcaacagtggggaccccaccaccaccatcctggagtgattccaactcaactcagaggacacccagagctgccatctggtatctgccagtttttccaaatgacctgtaccctacccagtaccctgctccccctttcccataattcatgacatcaaaacaccagcttttcaccttttccttgagactcaggaggaccaaagcagcagccttttgctttttcttttttcttccctccccttatcaagggttgaaggaagggagccatccttactgttcagagacagcaactccctcccgtaactcaggctgagaaggaaccagccagctcttacctcctcctggttgcttttcttgcccccaccccaagtttatttttgttttcccccggccccctacctctgaagccattttatgatctgtcatgtgccacctgagcctccagtaaaaacaaaaacaggctttcctgtggtaaaaaaaaaaaaaaaaaaaaaaa

SEQ ID NO: 1145 - DNA, 2592 bp, Homo sapiens
agggcgaacgggcgagtggcagcgaggcggggcgggctgaggccagcgcggaagtctcgcgaggccgggcccgagcagagtgtggcggcggcggcgagatctgggctcgggttgaggagttggtatttgtgtggaaggaggcggaggcgcaggaggaagggggaagcggagcgccggcccggagggcgggaggaggcgcggccagggcgggcggttgcggcgaggcgaggcgaggcggggagccgagacgagcagcggccgagcgagcgcgggcgcgggcgcaccgaggcgagggaggcggggaagccccgccgccgccgcggcgcccgccccttcccccgccgcccgccccctctccccccgcccgctcgccgccttcctccctctgccttccttccccacggccggccgcctcctcgcccgcccgcccgcagccgaggagccgaggccgccgcggccgtggcggcggagccctcagccatggcctcgggcgacaccctctacatcgccacggacggctcggagatgccggccgagatcgtggagctgcacgagatcgaggtggagaccatcccggtggagaccatcgagaccacagtggtgggcgaggaggaggaggaggacgacgacgacgaggacggcggcggtggcgaccacggcggcgggggcggccacgggcacgccggccaccaccaccaccaccatcaccaccaccaccacccgcccatgatcgctctgcagccgctggtcaccgacgacccgacccaggtgcaccaccaccaggaggtgatcctggtgcagacgcgcgaggaggtggtgggcggcgacgactcggacgggctgcgcgccgaggacggcttcgaggatcagattctcatcccggtgcccgcgccggccggcggcgacgacgactacattgaacaaacgctggtcaccgtggcggcggccggcaagagcggcggcggcggctcgtcgtcgtcgggaggcggccgcgtcaagaagggcggcggcaagaagagcggcaagaagagttacctcagcggcggggccggcgcggcgggcggcggcggcgccgacccgggcaacaagaagtgggagcagaagcaggtgcagatcaagaccctggagggcgagttctcggtcaccatgtggtcctcagatgaaaaaaaagatattgaccatgagacagtggttgaagaacagatcattggagagaactcacctcctgattattcagaatatatgacaggaaagaaacttcctcctggaggaatacctggcattgacctctcagatcccaaacaactggcagaatttgctagaatgaagccaagaaaaattaaagaagatgatgctccaagaacaatagcttgccctcataaaggctgcacaaagatgttcagggataactcggccatgagaaaacatctgcacacccacggtcccagagtccacgtctgtgcagaatgtggcaaagcttttgttgagagttcaaaactaaaacgacaccaactggttcatactggagagaagccctttcagtgcacgttcgaaggctgtgggaaacgcttttcactggacttcaatttgcgcacacatgtgcgaatccataccggagacaggccctatgtgtgccccttcgatggttgtaataagaagtttgctcagtcaactaacctgaaatctcacatcttaacacatgctaaggccaaaaacaaccagtgaaaagaagagagaagacccttctcgaccacgggaagcatcttccagaagtgtgattgggaataaatatgcctctcctttgtatattatttctaggaagaattttaaaaatgaatcctacacacctaagggacatgttttgataaagtagtaaaaattaaaaaaaaaaaactttactaagatgacattgctaagatgctctatcttgctctgtaatctcgtttcaaaaacacagtgtttttgtaaagtgtggtcccaacaggaggacaattcatgaacttcgcatcaaaagacaattctttatacaacagtgctaaaaatgggacttcttttcacattcttataaatatgaagctcacctgttgcttacaatttttttaattttgtattttccaagtgtgcatattgtacacttttttggggatatgcttagtaatgctacgtgtgatttttctggaggttgataactttgcttgcagtagattttctttaaaagaatgggcagttacatgcatacttcaaaagtattttcctgtaaaaaaaaaaaagttatataggttttgtttgctatcttaattttggttgtattctttgatgttaacacattttgtataattgtatcgtatagctgtattgaatcatgtagtatcaaatattagatgtgatttaatagtgttaatcaatttaaacccattttagtcactttttttttccaaaaaaatactgccagatgctgatgttcagtgtaatttctttgcctgttcagttacagaaagtggtgctcagttgtagaatgtattgtaccttttaacacctgatgtgtacatcccatgtaacagaaagggcaacaataaaatagcaatcctaaag

SEQ ID NO: 1146 - DNA, 1438 bp, Homo sapiens
atggcggccctgggggacgaggtgctggacggttacgtgttcccggcgtgccccccctgctcgtaccggtacccataccccgcggccaccaagggcaagggcgcggcgggcggcagctggcagcagcgcggcaggggctgccttcccgcctcctccccctgctcggcgggcgcggcctcgttgtccttcccgggctgcgggcggctgacggccgccgagtacttcgacagctaccagcgggagcggctcatggctctcctggcgcaggtggggccgggtctcgggccgcgcgcccgcagggccggcagctgcgacgtggcggtgcaggtgagcccgcgcatcgacgccgcggtacagtgctcgctggggaggcgcacgctgcagcgccgggcccgcgaccccgagtccccggccggccccggggccgagggcaccacgggtggcggctctttctcccagcagccatcccgtcgaggcctggagcagggcagcccccagaacggcgccccgcggcccatgcgcttcccgcgcaccgtcgccgtgtactcgcccctggccttgcgccgtctcaccgccttcctggaggggcccgggcccgcggcgggcgagcagaggtccggggcgtcggacggagagagggggccgccgcccgcgcggcttcaaggcccagaggagggggaggtgtggacgaagaaggcgccccggcggccgcagtccgacgacgacggcgaggcccaggccgcagtccgagcgagctgggagcagccggccgacggtcccgagctgccgccgcgagaggcccaggagggcgaggcggctccgcggtcggcgctaaggagcccggggcaacctccgtcggcggggagggcccgagacggcggcgacggacgggaggcggccgtcgcgggagaggggccgtcgccacggagcccggagctgggcaaggagcggctgcgcttccagttcttagagcagaaatatggctattaccactgcaaggactgcaacatccgctgggagagtgcttatgtgtggtgtgtacagggaactaacaaggtttacttcaaacagttttgcagaacttgtcagaagtcttataacccttaccgagtggaggatatcacctgtcaaagttgtaaacaaacgagatgttcctgcccagtaaaacttcgccacgtggaccctaaacggccccaccgtcaagatttgtgcggtagatgcaaaggcaaacgcctgtcctgtgacagcactttcagcttcaaatacatcatttaggtgaaagtcagtgttgctgtgcatgcgctgatggagtagacgagtgagcttttccgtgcctctcctccacctctcccttctcaaaatacttcatgaaaggcagtgtattctgaaaaagccttcaaataaaggtattgcaacacgatttatacattgcataaaa

SEQ ID NO: 1147 - DNA, 2839 bp, Homo sapiens
tagggacaagcctgagcgtcacaggctccccacaaacaaccgcgtgacccggggactttccccagggtgtgcaaaagcacaggcaccccctcagttctggggtgaagcacagtccctggcagagccagagcctctccgcgcagcccagcccgagcgccgagcgccgcgcgccgccgccactgcagctcgcggccccttcgccttcgcccgcctttcccgcggctgatttgccttaaactccctaaaatctccgcagctctggttcctgttgcggccgtgccctctggtggtcagaagatgctgtgctgtctcgttaggatgaatggattaaaatgtacttttcctcctctgcttctggagagggagagaggaatattccagaagccactgtgttccttctgctttctgtgtgggtctctaattaacagaagatggcaaagcccagccacagcagctatgtccttcagcagctaaacaaccaaagagaatggggttttctctgtgactgctgtattgcaattgatgacatttactttcaagcacacaaggcagttctagctgcctgtagctcctattttagaatgtttttcatgaaccatcagcatagtactgcacaactgaatctcagcaacatgaaaattagtgcagaatgttttgatctcattttgcagtttatgtatttaggaaaaattatgacagctccctccagttttgagcagtttaaagtggcaatgaactacctacagctatacaatgttcctgactgtttagaagacatccaggatgcagattgttctagttcaaaatgttcctcttctgcttccagcaaacagaacagcaaaatgatatttggggtaagaatgtatgaagatactgtggctcgaaatggcaatgaagccaacaggtggtgtgcagagccaagttcaacggtaaatacaccacataatagagaggctgatgaagagtctttacaattaggtaattttcctgagccactatttgatgtatgtaaaaaaagttccgtgtccaaattatctactccaaaagaacgtgtgtcaagacgctttgggcggagttttacctgtgatagctgtggatttggctttagctgtgaaaaattattagatgagcatgtgctaacctgtactaacagacatttataccaaaacacaagatcttaccatagaatagtagatattagagatggaaaagacagtaacatcaaagctgaatttggtgaaaaagattcttccaaaacattttctgcacagacggacaaatacagaggagacacaagccaggctgctgatgattcagcttcaaccactggaagcagaaaaagtagcacagtggagtctgaaatagcaagcgaagagaaaagcagagctgctgagaggaaaaggattattattaagatggagccagaagatactcctacagatgaactgaaagactttaacattattaaagttactgataaagactgtaatgaatccactgacaatgatgaattagaagatgaacctgaagagccattttatagatactatgttgaagaagatgtcagcataaaaaaaagtggtaggaaaactctaaaacctcgaatgtcagtaagtgctgatgaaagaggtggtttagagaatatgaggccccctaacaacagcagtccagtacaagaggatgctgaaaatgcatcttgtgagctgtgtggacttacaataaccgaggaggacctgtcatctcattacttagccaaacacattgaaaatatctgtgcatgtggtaaatgtggacaaatacttgtaaagggtaggcagcttcaggaacatgctcaacgatgtggcgagccccaagatctgaccatgaatgggttaggaaatactgaggagaaaatggacttggaagagaatcctgatgagcagtccgaaataagagatatgtttgttgaaatgctggatgattttagggacaatcattaccagataaacagtatccaaaaaaagcagttatttaaacattctgcctgcccttttcgatgtcctaattgtggccagcgttttgaaactgaaaatctagtggttgaacatatgtctagctgcttagatcaagatatgtttaagagtgccatcatggaagaaaatgaaagagatcacagacgaaagcatttttgtaatctgtgtggaaaaggattttatcagcggtgtcacttaagagaacactatactgttcatactaaggaaaaacagtttgtttgtcaaacatgtggaaagcagtttttaagagagcgtcagttgcgactgcacaatgatatgcacaaaggcatggccaggtatgtctgttccatttgtgatcaaggaaacttcagaaaacatgaccatgtacggcatatgatttctcatttatctgctggtgagactatatgccaggtctgctttcagatattcccaaataatgaacagttggagcagcacatggatgttcatctgtatacatgtggaatatgtggagcaaaatttaatttgaggaaagatatgagatcacattataatgccaagcatttgaaaagaacctgagtgattttctactgtactaatgtttagatgatagcagataaaacaccaaagcaaaggatatgagctatttaggaattgattatataagatgatttgttagaaacaaatttcaaggcccttttaactttaatatttttgtttaggattttaagtatctacatttaggtattaaatgtttatcatttttgttgtttcttaatagaattatttgtttttagtttttcttagctatgattaaaatttttaaatgtaaaaaaaaaaaaaaa

SEQ ID NO: 1148 - DNA, 3105 bp, Homo sapiens
cgcggcggcagcagcagcagcagcagcgagaggcagaggcggcggcggcggggaggacagcacggccgaggctgcccagcggcgcctcctccacaccccccgccgcagcagcaccggcgacagattttttaaaaaatggatttggccaaccatggacttattctactgcaacagttaaacgctcagcgagagtttggtttcctgtgtgactgcacggttgcaatcggcgatgtatacttcaaggcacacaaatcagttcttgcttcattctccaattactttaagatgttgtttgtccatcagaccagtgagtgtgtccgcttgaaaccaactgacatacagcccgacatcttcagctatctcttacacttgatgtacactgggaagatggcgcctcagctcatcgacccggttcgattagaacagggcatcaagtttctgcacgcctacccgctcattcaggaagccagcctcgccagccagggagccttttctcaccctgaccaagttttcccactggcttcttcattgtatggcattcagattgcagatcatcagttgagacaagccaccaagattgcttcagcacctgaaaaactcgggcgagatccacggccacagacctccaggataagccaggagcaggtccctgaggcctcacagctctcccagctgacttcaaatctggcccaggtgaatcggacaaatatgactccctcagaccccctgcagacctcgctgtctccagaacttgtttccactcctgttcctccccctcctcccggggaggagaccaatctggaagcatcttcctccgatgagcagcctgcgtccctcacaatagcccacgtcaagccaagcatcatgaagaggaatgggagctttccaaagtactatgcctgccacctgtgtggacggcgcttcactctccggagcagcttacgtgaacacctccagatccacacaggagtacctttcacatctagccaacagggagaaagtcgcgtccccctgactctctgtagcaatgcagctgacctcgggaaagatgccatggaagtgcctgaagccgggatgataagtgacagtgagctgcagcacatctctgattctcccatcatcgatgggcagcagcagtcggaaaccccacccccctcagacattgctgacattgacaacctggagcaggccgaccaggagagggaggtgaagaggcggaagtacgagtgcacaatatgtggacgcaaatttatccagaaaagccactggagggaacacatgtacatacacaccgggaagcctttcaagtgcagcacttgtgacaaaagcttttgcagggccaaccaggctgcccgccacgtgtgcctcaaccagagcatcgacacttacaccatggtggacaaacagactctggaactctgcacatttgaggaagggagtcagatggacaacatgctggtgcaaacaaacaaaccctacaaatgcaacttgtgtgacaaaacattctccactcccaatgaggttgttaaacattcatgccaaaaccagaactcggatgtttttgccctagacgaagggcgatccattctcctgggcagtggggactcggaagtaacggagcctgaccacccagtgttagcttccatcaaaaaggaacaagaaaccgtcttactagactgaatgtcacttatctttttaaaaaactctcatttttacaaagactatcttccctcccttccctgaattcagaactgtagttctccatggcatgatacaaacaggtccttgttctcttctcctcttccccttttccacatcccagccccacctctgtaaaggctttgtgcattataaacctggaatgtatcgactttctttcaggggatattggaaagataatggtcattatacttataaactcaaattttgagaggttttagattattcagaagcatacttggaactaatgaagggtatataataaaacaactggaatccaatttggtaagctaaaattatgactttccctgggtaaaaagtcttctcagaaaaacaatgtcagaaaataacagcgtgctgcttagaaatacggctgggctctgtactatgcaaaatctagaaagtgtggggaaactttaaacccaagaaaacgttcttagtattcatcctccaggtgtcttacttcagaatgcatcctttgagattatgtccacttaagagaaatcatcagttaagaaatctactttaacaaaacaaaaaggagaaaaagtaataatgtgatggcaatcttaatttttgggtacaacatgacaagctgtgagtttgtgtgtttgtaagagaaaaatgtgtgggtacttgctaataaacaggtgaattaatgcacatccttatctcattgctggcttctttccaagttgagcaacaacaaaatgctgtatttgagtttctgacaaatttgttttaaaaatcaaatttgaatgtactattctataaattgcctttctgaatagaacatgacatgccattttctagcagctgccagtgataatttgttttacactaacttttaaatcagtgtgtgtactgcagggaaaaggatataggaatactcatcttacaggggaatttgtgaccagaagatgtagtaacttcaatgactgaaagtcaatgctgatagtttactggcaacattaattgaagcatcaaaaataaatggcaaagagaaatcaggacaaaaaatctaattgctgtttgggaaaaaacttgattttgatgtttattctccaggtttttggttgtttttttttctttcttctttcttaatgcctgaaattttctccattggcccgaaagcagtaaaaattgttcattaatcttccgttaggccaataaaagaagggcctcacaagacaaaacaggagccagaagtaaggactgaaggagaaggggagaatagctaatagctatagtatatgtatatgttaaaaactgaatatcccatcatcctatttcatgtatagttgagttctcaaatttgtaagtttttatacatcctttcattgaataaacgtttaattaaatgagtaaaaaaaaaaaaaaaaaaaa

SEQ ID NO: 1149 - DNA, 5961 bp, Homo sapiens
agagtcgtgggtaaaccccccgctcgctggttgggcgaccttttgaagtgacagggagagaagaatttttttctttaatcccaccgcctctcctcgctgctcccttttgcactgaggcttaaggtttgaagactcgagggtaaaattgggccgctttcattctagtttggacaacggtttcatcttcagcaaaagcctctcattcgtagccccccccagctggaaaatggtctgctctgcgaatcgaaggaagaggcccagcagaagggactcgctgagccaccccccgccccactccatgttggctgtgctctcaggctggcaccatgcccccccctgcagaggtgacggacccgtcccatgcccccgccgtcctgcgccagctcaatgaacagcggctccgtggcctcttctgtgacgtcaccctcatagccggagacaccaagttccctgctcaccgcagcgtcctggctgcttcaagtcccttcttcagagaggccctgctcacttcagccccactaccccttccaccagctactgggggcgccgcacccaaccctgccaccaccacagctgcctcttcctcctcctcctcttcctcgtcttcttcctcttcttcctcctctgcttcttcttcttcttcctcttcctcttcctctccccctccagcctctccccctgcttcttccccaccccgggtcctggagttgccaggagtcccagcagctgcgttttctgatgtcctcaacttcatctacagcgcccggctcgcactgcctggtggtggaggggacggggcagctgtagcagagattggagctttggggcgccgtctgggcatctcccgccttcagggcctgggggagggaggtgatgcctgggtacctcctaccccagcccccatggccacctcgcagcctgaagaggacagctttgggcccgggcccaggccagctggggagtgggagggtgacagggctgaggcccaggcccctgacttgcagtgctccctgccccggcggcccctcccctgcccccagtgtggaaaaagcttcatccatcccaaacggctgcagacccatgaggcccagtgccgacgaggggccagcacgcgggggtctacagggctgggagctgggggcgctggccctggtggtcctgcaggggtggacgcctcagccctgcctccaccagtgggcttccgagggggccccgagcacgtggtgaaggtggtgggcggccacgtgctgtatgtgtgcgcggcctgcgagcgttcctacgtgaccctgtccagtctgaagagacacagcaatgtacactcgtggcggaggaagtacccctgccgctattgtgagaaagtgtttgctctggcggagtaccgcacgaagcatgaagtgtggcacacgggggagcgcaggtaccagtgcatcttctgttgggagacctttgtcacttactataacctgaagacccaccagcgagccttccacggcattagcccgggcctccttgccagtgagaagacacccaatggaggctacaagcccaagctcaatacactcaagctctaccgcctgctccccatgcgggcagccaagcggccctacaagacctacagccagggagccccggaggctcccctttctccaaccctcaacacaccggcccctgtggcaatgccagccagcccgccgcctgggcctccacctgccccagagcctggccctccaccctctgtcatcacttttgcccacccagccccctctgtcattgtccatgggggcagtagcagtggtggaggggggagtgggacggccagcacaggagggtcccaagctgcctcggttatcacttacactgctcccccgaggccacccaagaaacgagaatacccacctcctccccctgagcctgcagccacacccaccagcccagccacagcagtcagcccagccaccgctgcagggccagccatggccaccaccacggaggaggccaagggccggaatccacgggctggaaggactctgacttacacagccaagccagtgggcgggattggtggaggtgggggtccccccacaggggctggccggggcccctctcagctgcaggctccacctccactgtgtcagatcactgtgcgaataggggaggaggccatcgtcaagcgccgcatctcagagactgacctgcgtcctggggagctgagcggagaggagatggaggagagtgaggaggacgaagaggaggaggacgaagaggaggaggaggaggatgaggaggaatcaaaggctggtggggaggaccagctctggaggccctactactcctacaagcctaagcgcaaggctggagctgctggaggtgccagtgtggggggcagtgggctgccccgaggccgccggccaccacgttggaggcagaagctggaacggaggagctgggaggaaaccccagcggccgagagcccagcgggacgtgcccgcacagagcggaggcaccgatgcggggactgtgcccagaccttcaccaccctgagaaagctgcggaagcaccaagaggcccacggtgggggctcccacagctcccgggccggacggaggccctccacccgctttacctgcccccactgcgccaaggtgtgcaagaccgcagctgccctgagccgccacgggcagaggcatgctgctgagcggcccgggggcaccccaacccctgtcattgcctattccaagggcagcgctggcaccaggcccggggatgtcaaggaggaagccccccaagagatgcaagtctcctcatccagcggtgaggcaggtggcgggagcactgctgctgaggaagcttccgagaccgcctcactccaggaccctatcatttcagggggtgaggagcccccagtagtggcaagcgggggcagctatgtatacccacctgtgcaggaatttccactggccttgattgggggcggccgggaacctggcggtggcaggggaaaatctgggagtgaagggccagtgggggctggtgagggggaccggatggaggggataggggctgccaaagtcactttctaccctgagccctacccgctcgtctatggcccccagctccttgccgcctacccttacaacttcagtaacttggccgctctcccggttgctctcaacatggtcctacctgatgagaagggtgcgggggcccttcccttcctaccaggggtctttggctacgcagtgaatcctcaagcagcaccccctgccccaccaacaccacctcccccaactcttcctccaccaattccccctaagggagaaggggaaagggcaggggttgagagaacccagaagggcgatgtggggtgaaccctggggctcaatccccctttcaccagatgccaccctccctgaaccccccaccactaccagctccctggcctccctgccccttgggagccccttcacactcttgtgcagggacttgggggcccctggagctcaggggtcaggctgctttgtgtgagatgtagttttcccatctcctgggaagggatctttcgaggttcccctctcagtcttcctccagggaatggcctccatgaggggcagggccagcttccatcccttctccagcccttggggcaactgagcaatatacttaacctgaatctctactcacagcccccaccagctctgaatgtctaacctgctcccctgattcgtaaacctaggggaaaccatctctctcacctaatgacccgccttgttctgaagctttctctaagcccttcccagttgcttcctagcacattccattctttgtggcccagggcctggaccagaccattgtgatacctgaccccgcccacctgggagtgtggctttgggtttcatccttccccagcgtgggtctctacgtccctgtttcccttgtatcaagacaccttcctcagcttccatgcctttggatcttccatgttcctccccatattcctggacttcggagatggcctctcccaagccaggtcaaggaggtttgggggagggttgcccctctgcccctctgttctgtggctgagcactttcccagtccagggcagggaaatattggccctatcttgacccccaaatccagtgagctccagattcttccaaggcaaaagaggtaagcagatcacacctctttctgcctctacatatggcctattctgggctagaccagatttgggggccaggagggaagaactccatatgggatggagaagggaatctactttctccctgtttttttttcctgatggtttctcccagactagaccaaatagccagaaaaatgataggggtcggatgggtgggtaagcccaggatttgcacatgaccttccatccttacctgtattcccatctccccagtgtcactcccctcaccaatcactccagatggttttgggggaaccattctactcttctggtgggctttggggtatccccaccaactttcccttcaaaatagcaccttacaccccatctttgactcagttccccacacccaaagatcccagcctagggatggggtacagggactttaaatagtccctaatccctaatttgcactagttaaccctggtcagggtccctgtatttccttccagtgggggagataaatgtttgctcctaattctctttgaaaactgggcctccctgctctgtgattggataaatatttcccatcccacccacctccccccaaaaaatagctcacaaggggagagccagtatgggggagcaaatttgacaaatgggaattagaggagtgcagttttaaaaggaaaagttgctgtcatcaaaatggcagccttttccccagctactgtttttggggccaagatggctgccctagcagcaatcactgccaagggcaagatcatggcttttggagggaggtgagtttagggagggccaggaccatcctcctacccctcataccctcccagcatatacaaaaggggaggttttagacaggctccctgaatgttaaccacagaggagtcactccttcattcctcctctgtctctttgcacttttcttggtcttggccacagcctgagtgacgaatttcctactgaatgtaccaagttccaatttttaagggggggaaaggtttcaaatggggaaaaacacacaaaaaaaaaatcactaaaaattcccacaaatcttgtttctggcactttagaaaaactgcaaaaaaatacgtaataaagaatacatatatatatatctacacacaaattatatatctatctatctatacagcggaaccacaagagagactgaggaaggcctggaggcaggggcagaggtgacgacagtgcccctatatccttaacccatactcctctgaggcaaacaggcatgggaaaatggaagggttgaggatggaccggagaattggaacttcagaataggtcaaaattccaaaaccatggacatttttttttgggagaattgagattgtagacattttttttttcttaaatatgatcaaggaaaatagcttccagaatgtggtggttctgggcaacaaatgagattgtggcgacgtggagattaaaatatatgtatttgagctggggaatttgaatattgtgagtttcagatgttggaaatttgggattttgcagttttgtcttttgaaaatgatcaagtcttgtcagttcgtgccctctttccccatgttccctgggaagacgggtggtggcagagtgagaaggccactggttctgtgccgcagcacgcaaaatttagaattctacagactagctctatacgtagtgaggacccagatttagagaaactgaccaatatttatctccgcatttgtgtgtgtgtccaactctgtaggccaataaaccaacaagacaaatgaactgtgctccacaaaaaaaaaaaaaaaaaaaaa

SEQ ID NO: 1150 - DNA, 1184 bp, Homo sapiens
gcccctccagcctgctggagccggagccggagccggagccggagccggagccggagccagagccagagctcgaggactcaccggcccagtctccgtccgggatggggccccgctcccgggcgcgttgccgcccagtcccggggaccgtccctaccgcgagggtctgaggcgcggctgccccggggagggtggaaggccaggcgtggggcccgaacctctggctgactttggcagggcccatctggcacggcctccgcggcgcgcagctgttttcaagtcagcaaacatttactgaggatctactatgtacaagatgaacatctgcaacaagccctccaacaagacggcccctgagaagagtgtgtggacggcaccggcacagcccagcggaccctcccctgagctgcagggccagcgatcccgccggaatgggtggagctggccccctcacccgctccagattgtggcctggctgctgtacctcttctttgctgtgatcggctttgggatccttgttcccctcctgcctcaccactgggtgcccgctggctacgcttgcatgggcgccatctttgctggccaccttgtggtgcacctgaccgccgtctccatcgatccagcagatgccaacgtgcgggacaagagctatgcggggcccctgcccatcttcaaccgaagccagcacgcacatgtcattgaagacctgcactgcaacttgtgcaacgtggatgtgagcgctcgctccaagcactgcagcgcctgcaacaagtgcgtgtgcggtttcgaccaccactgcaagtggctcaacaactgtgtgggcgagcggaactaccggctctttctacacagtgttgcatccgctttactgggcgtcctgctcctggtgctggtggccacatatgtcttcgtggagttctttgtcaaccccatgcgtctgcgcaccaaccgacactttgaagtcctgaagaatcacacggatgtgtggttcgtgttcctgcctgccgcccccgtggagacccaggcccctgccatcctggccctggccgccctgctcatccttctgggcctcctgtccacagccctcctggggcacctgctctgcttccacatttatctcatgtggcacaagctcaccacctatgagtacatcgtgcagcaccgcccaccacaggaggccaaggggg

SEQ ID NO: 1151 - DNA, 2952 bp, Homo sapiens
ggcgcggtcgagtcatcgcagggcctcaccgcttcgttctcccgtccctccccgcgccttggctcgactagccaagtgaggcgggaggcgactcggacctttccctgcatttcgtttcggccagtgccggggctacccgccctggggcctgggatccttggggcccgtgagccactcttagcggccggggctaccgcggcccgccgtggccctcatgaggcatagctgaccaagctgctggcagcctcgggcagcaactccccaacccgcagtgagagcccggagccggctgcaacttgttcgctgccctctgacctgacccgggctgcagcgggggaggaggagacggcggcggcgatctcccggccgcaagcagcagtttggcgacgaaggagagttggaagccgggagggggagccgcggcggcgtggccgtgcgcgcgccctcccccgaggagatggaggaggaggcgatcgccagcctcccgggggaagagacggaggatatggactttctgtctgggctggaactggcggatctcctggaccccaggcaaccggactggcacctggaccccgggcttagctcgccggggcctctctcctcgtctggcggaggctcggatagcggcggcctgtggagaggggacgatgacgatgaggccgcggctgctgaaatgcagcgcttctctgacctgctgcaaaggctgttaaacggtatcggaggctgcagcagcagcagtgacagtggcagcgccgaaaagaggcggagaaagtccccaggaggaggcggcggtggcggcagcggtaacgacaacaaccaggcggcgacaaagagtccccggaaggcggcggcggccgctgcccgccttaatcgactgaagaagaaggagtacgtgatggggctggagagtcgagtccggggtctggcagccgagaaccaggagctgcgggccgagaatcgggagctgggcaaacgcgtacaggcactgcaggaggagagtcgctacctacgggcagtcttagccaacgagactggactggctcgcttgctgagccggctgagcggcgtgggactgcggctgaccacctcgctcttcagagactcgcccgccggtgaccacgactacgctctgccagtgggaaagcagaagcaggacctgctggaagaggacgactcggcgggaggagtctgtctccatgtggacaaggataaggtgtcggtggagttctgctcggcgtgcgcccggaaggcgtcgtcttctcttaaaatgtagggtcaagtaatctgctctttatccgcgtttacccctttcaactcccttacaccatgtcaaacttaccttagtgggacatcttcaccggacacatttcagaggagagaaaaaaagtaatattgaatcttaaagtgtttagctaaaagcatgaatgtgacacagtaaccaactcctaatgataacatgtgactattaaatctctctgacagtttcttttttaggtgatttccttcctgccaggctccgttgtaggggttacagaacagtcgttcccgcctcacaacctgtggatacagctgttggggcagaagagacgggaccagctgctggccacatttcctgctttattttaaaaggtagtataagaatgaggaaaaagaggtaatatcagggcttctgctgttttttatttttaacatgttcataattaaaaagtattttccagcagtccaaagatgtaagttatcttacacataatatgttttattttgttatttggttatgaaaatggaatccttgttcttgcacaactgtaaatgttttgttgctagataatacgatttgagacctgaattggtctttggtttccagtgcatcacagcatattttgtaaaatcatgtactactgcacttgagcatgaatgggtagtagccaaactcacaaattggagtgatgaacctgcttatacctaagggcaggagcaagcccctcacaatgcagctgcatgggtttttagtgcctactgaattatatatatatatacatatatatatatatatataaaccaaaagtagttggaaagattatttgaaatgactaactttgtgctatctttatgaaatatgttaaatgtagcttttttgaaacagaagccttgaattgaaatttaactaatacttgaacattttgtatatatttctttgtatataattttgtgcagtaccaatgacaaaaatatggtgtcataataaaaccaggtttgttgatcttttagttatgggctcaaagaatttattcatctctaacatgatattggaaaataatggatgaaaataggaaaaatgattgttaatgctgactgtgggtcttaaaaggttctggaaagcagtaagttcatttttctaaaaactataacattctgttggagtattttcttccttacgtcaatacttttcctgcattatttgaaattgtgggctggggagaaacagtagtcaaagctttctgaattgagatactttgaaattccaagtgtagatttttagaatgtcattttataaatggccgtttttggaattacttgataagaacttttgaaaatggaaggattagtatggcctatttttaaagctgctttgttaggttccttatgttttattaactgtcttttctcagtttccatttcatttttttttttctagttttggtgacttagtgattttgtcattttttacatcaacttcatggtcttgtttttacatggtaattgcatgtacttaggatctatctaataggggctttaaataaatttggtcatatttatgtgtaagcacattttactgtaaatgtttgggtttctgaatttaaacagatctgtttatttcagtatgtagtaaacaatatcttaaagtgtccgattcactacttgttaattaaaaaagttatgattaatgtg

SEQ ID NO: 1152 - DNA, 3000 bp, Homo sapiens
caggccacaccggtggtctgggctggggaccgcgggtcgggtccggtttccagggggttcctggtgctcgaggctggcggcgaggaaggaccagatggcctttgaggatgtggctgtgtacttctcccaggaggagtgggggctcctggacacagcccagagggccctgtaccgccgcgtgatgctagacaacttcgcacttgtggcctcgctgggactctccacctctcgacctcgtgtggtcatccaactggagcgtggcgaggagccctgggttcccagtggaacggacacaaccctgtccaggaccacctacaggaggcgcaaccctggttcctggagtttgacagaggatagagatgtttctggagaatggccacgagctttcccagataccccacctgggatgactactagcgtcttccctgttgccggtgcctgccacagtgtaaaaagcctgcagagacaacggggtgcctccccatctcgggagagaaaacccacgggggtgtcggtgatctactgggagaggctcctgctaggctcaggcagtgggcaagccagcgtcagcctgcgactgacctccccgcttaggcctcccgagggcgtccggcttagggaaaagacactcacagagcatgcgttgctggggaggcagcccaggacgcctgagcggcagaaaccatgtgcacaggaggtccctgggagaacctttgggagcgcccaggacctggaggctgccggcggtcggggacatcaccgaatgggtgcagtttggcaggagcctcatagactcctcggtggccaggagccctcgacctgggacgagctgggcgaggctcttcacgctggggagaagtccttcgaatgcagggcgtgcagcaaagtgttcgtgaagagctccgacctcctcaagcacctacgcacccacaccggggagcggccctacgagtgcgcccagtgcggcaaggccttcagccagacgtcgcacttgacgcagcaccagcgcatccacagcggcgagacgccctacgcgtgccccgtgtgcggcaaggccttccggcatagctcctcgctggtgcggcaccagcgcatccacacggccgagaagtccttccgctgctccgagtgcggcaaggccttcagccacggctccaacctcagccagcaccgcaagatccacgcgggtgggcgtccttatgcttgcgcacagtgtggccgccgcttctgccgcaactcgcacctgatccagcacgagcgtacgcacacaggcgagaagcccttcgtgtgcgcgctctgcggtgctgccttcagccagggctcctcgctctttaagcaccagcgcgtgcacacaggcgagaagcccttcgcctgcccacagtgcggccgcgcctttagccacagctccaacctcacccagcaccagctcctgcacacgggcgagcggcccttccgctgcgtggactgtggcaaggccttcgccaagggcgccgtgctgctcagccaccggcgcattcacacgggcgagaagcccttcgtgtgtacgcagtgtggccgcgccttccgtgagcgcccggccctcttccaccaccagaggatccataccggcgagaagaccgtccggcgatccagggccagcctgcacccccaggccaggtctgttgccggggcatcatcagaaggtgcgccagcgaaggaaaccgagcccactcccgcctcgggcccagccgccgtctcgcagccagcggaggtctgaggtcacaggttgcagccctggccttctgtgaatcccttccacagctaaagggcatatgtcctctgcagatccacagcagagaaaaagtcccgtgcttgctagtcagggacaagggaggccctttggctgtgatttcatttgcacgtggggacaggatttgccagttcacccacagatcacacctccatccccaaagaggtagcactgcagcaacatcagggggaggacgtggtggctgaactctagtggggccgagactattcagagccagtaggaggccgacagtcacagcactgcactgtggtgcggcttcatgtgatatgacagtggatgctaaggtgagagggatgcaggcatgggttgggggtggcccagagaaacttatgacagctgtacacaaactggccgctggagagatgcccgctgagggtattctcccctcaacccactgcctctgttcatccaagacttcctaggggccagcctagcagacaagagaccacaagggactggggatcagggtctgggctctgtcagccgccacctctgggaaagagaaaaggtttgggtccactgaacatcatgtttgtagacgctgacaggtggggtcctaatgagagccaacacatgctcactgccagctcctgtcctgagtactgggaagtttctcctgaagccctgtgagatggctctgtggctggtatcccgacttggaagatgaggaaactgaggcacacggcctggcctggcttcacacacatagccgactcaggagagggatgcccatgggggaacatgtgactctcagcattggaaggacagagctaggatgatggctttccggtggcactcgttcaggtttttgcccaagtctcagcttggccaaggcctgtcactgactggtttaccaaagtcgatgtgaggaggaggctttatacctgaggggatgatgttaacttcagacaagatggagctgctcacttttgccgggtttggtggccacttcacccccaaccctgtctcacccccattatccctcctcaattggaggctggacagagctgaataggaaagacttgctattgcctaaggctatgtgtgacaccctcctgaggacctccccaccccagtgtaatggcccttcatggcagggacagaaaggtggactgggggccatttgcttcctgtggccttcagcagaccaggccctgtccctacctggagcctcacctccaaggaaattc

SEQ ID NO: 1153 - DNA, 5508 bp, Homo sapiens
gcctttgtctctggctgcagccggagctcctgctctcctcctcactgctcagtgtcctctgctcctagaggcccagcctctgtgtccctgtgacctgcagatattgggagatccacagctaagacgccgggactccctggaaacctagaaatgatggagtctcgctctgttgctcaggctgaagggcagtggtgcgatctcggctcactgaaacctccgccttccgggctcaagcaattctcctgcctcaacctcgcaagtagctgggattacaggcatgcaccaccatgcccagactgtgccataacacacatttgatgctgaaatccgggataggggaactcctttgggagtcgtgtcccttaaccccttcccccgacttcttgaagagacccacccgcgacctcggtacctcggaccagctctgtaaaagccccgcctctgccttcggataggtctggccccaccctggagtcttgcctcacagaactgattagaagagatcagagttttggctggtgcctttccggagtggttgctaacaattcccgaattccacaaggagataaatgggaaaaaaaggaaccactgacatttaaagatgtcgccatagaattctctctggaggagtggcaatgcctggatactgcacagcgggatttatataggaatgtgttgttagagaactacagaaacctggtctttttgggtattgctgtctctaagccatatctgatcacctgtctggagcaaaaaaaagagccctggaatataaaaagacatgagatggtagccaaacccccagtaatgtcttttcattttgcccaagacctttggccagagcagaacataaaagattctttccagaaagtgacactgagaagatacggaaaatgtgaatatgagaatttacagttaagaaaaggctgtaaacatgtggatgagtgtacggggcacaaaggaggtcataatacagttaaccaatgtttgacagctaccccaagcaaaatattccagtgtaataaatatgtgaaagtctttgataaattttcaaattcaaatagatataagagaagacatacaggaaacaaacacttcaaatgtaaagaatgtagcaaatcattttgcgtgctttcacaactaactcagcatagaagaattcatactagagtgaattcctacaaatgtgaagaatgtggaaaagcctttaactggttctcaactcttactaaacataagagaattcatactggagaaaagccctacaaatgtgaagaatgtggcaaagcctttaaccagtcctcacaacttactaggcataagataattcatactgaagagaaacccaacaaatgtgaagaatgtggcaaggcctttaaacaggcctcacaccttactatacataaaataattcatactggagaaaaaccttacaaatatgaagaatgtggcaaagtctttagccagtcctcacaccttactacacaaaagatacttcacactggagagaacctctacaagtgtaaagaatgtggaaaagcttttaacctattctcaaatcttactaaccataagagaattcatgctggggagaaaccctacaaatgtaaagaatgtggcagagcttttaacatatcctcaaaccttaataaacaggagaaaattcatactggagggaaactcaacaaatgtgaagaatgtgacaaagcttttaaccgatccttaaaacttactgcacataagaaaattctaatggaagagaaaccctacaaatgtgaagaatgtggcaaagtctttaaccagttctcaactcttactagacataagataattcatactggagagaaaccctacaaatgtaaagaatgtggcaaagcttttaaccaatcttcaaaccttactgaacataagaaaattcatactgcagagaaatcctataaatgtgaagaatgtggcaaagcttttaaccaacactcaaacctaattaaccataggaaaatttattctggagagaaaccatacaaatgtgaagaatgtggaaaagcttttaatcgatcctcaacccttactagacataagaaaattcatactggagagaaaccctacaaatgtgaagaatgtgacagagcttttagccagtcttcaaaccttactgaacataagaaaattcatactggagagaaaccctataaatgtgaggaatgtggcaaagcttttaaccgattctcaacccttactaaacataagagaattcatactggagaaaaaccctataaatgtgaagaatgtggaaaagcctttaatcaatcctatcaacttactagacataagatagttcatactaaagagaaactcaacaaatgtgaagaatttggcaaggcctttaaacagtcctcacaccgtactatacataaaattattcatactggagagaaaccctacaaatgtgaagaacatggcaaagtttttaaccagtcctcaaaccttactacacaaaagataattcatactggagagaacctctacaaatttgaagaacatggaaaagcttttaacctattctcaaacattactaaccataagataatttatactggagagaaaccccacaaatgtgaagaatgtggaaaagcttataaccgattctcaaacctaactatacataagagaattcatacgggagagaaaccttaccaatgtgcagaatgtggcaaagcctttaactgctcctcaacccttaatagacataagataattcatactggagagaaaccttacaaatgtaaagaatgtggcaaagcttttaacctatcctcaacccttactgcacataagaaaattcatactggagagaaaccctataaatgtgaagaatgtggcaaagcttttaaccaatcctcaaaccttactacacataagaaaattcatacttcagagaaaccctacaaatgtgaagaatgtggcaaatcctttaaccagttctcatctcttaatatacataagataattcatactggagagaaaccctacaaatgtggagattatggcagagctttcaacctatcctcaaatcttactacacataagaaaattcatactggagagaaaccctacaaatgtgaatatggcaaaacttaattgatcctacaagcttactacacataagaaaattcatactggagagaaactacaaatgtgaagaatgtgttaaagcctttaacaagtcttcaactttttctgcacacacgaggtattttatactggtgagaaaccttacaatgtaaagaatgtggcacagcttttaactaatcttcaaaccttactgaaagttgagaaaattcgtactggagagaatcctacaaatgtgaaaaatgtggcaaatcctttaactgatcctcaacttttactaaacataaggtaattcatactggagaaaagccatacaaatgagaagaatgtggcaatgcctttaatcagtcctcacacctttctacacataagataatttatactggagaggaactctatagttgtgaagaatgtggcaaagcttttaaccaatcctcataccttactatacagaaattcatactggagagaaagcctacaattgtgaagaatgtggcaaagcttttaaccttccttaacccttaactgtagataagaaaattcatactggaaagaaaccctacaaatgtgaagtctgtggcaaagcttttaactgattctcaactcttactacatgtaagagtatttatactggaaagaaaccctacaaatgtaaaaaacgtggcaatgcctttaactggtcctcacaccttgctacatataagacagtttatactttgagagaaaccctgcaaatgtgaataatgtggcaatactttaaaccaatcctcaaacctcactaaacataagataatactgaaaactttacaaacctgaatgatgtgacaataattttgacaacacctcgaactttctaacataaatcatactggtgaaaaatcctagaaatgtgaaaaatatcacaaagcctttaaatggttgtcacacttgattgtaggtaagaatccatactgaagaaaactcctggaagtgtaaaaaatgtggcaacacttttaataaatgctcaccccttattgcacaggaaagcatttatacttcagaaagattgtacaaatacaaggaatgtggaaaagccattattatctgctcagattttactcaacattagagagttagtacgtaataaaagcattataaatgcaatttttgtcaagagatctttcagaaaatataagcctttaaagtgaagaagaggagccagttgtgctggctcacatctgtaatgccagcactttgggaggccaaggtgggtggatcacctgagggcaggagtctgagaccagcctggccaacatagcaaaaccccatctctattaaaaattttacaaaaattagctgcgtgtggtggcaggcccctgtaatcccagctaattgggaggctgaagcaggagaattgctcaaacctgggaggcgaagattgcagtgagctgaaatcacaccactacactccagccaaagcaacaagagcaaaaacttcgtctcaaaaacaaaacaaaaaaagagtattcattgtgaggacaaacaatacaaatacgaagagggttgtagtacctttacttgtatcacagatacttttgtacccattttgcactagaggaaaaccatgaagcagttgctcaaatgttgttcaacaccagaaaatttatattggagaaaagcactgtaaatgtaatgcatttgtgaaaacattttttaaaaaactacagcttagaaaataccagaggcctcatactaaaatatatttttgcaagtgaagtaaatataaaaataatttaatccaaaattaagtctatataaatatcagagaattcacagtagaaatatctaaggtactgacacttcagacattgctgagtatagaatcagaatgctgagtatagaaaataatttaaaactaaagttggtaggtaaataatgtgtatataactttaaaagaagtagaatttttttgtagatgtataattacattcaaattatattttttcttgaaaaattagtttttgaaaagcaaatgatgtaattcaactcaaattcatgctcttcattcctattgtattcacatgtgaaagcatgtgattaatttttcatgcatcaaagatatgagaaatcatttctgttaggtcggtattatttatgacactttctatgaaagaataaggacattaaaatgtaagatgcatgatgaaaacctgagtgaagaggctgtttgtgtttaacttataatattgagtgatccatgaagtaggttttcagagcaatattcttctgcattatagtaagagaaaaccatttttaatcttagttaaaattaaagtgaattagtagtatatcattttactatttgtacttttatgtaataaaatgcaatgtgtttaaaaa

SEQ ID NO: 1154 - DNA, 13975 bp, Homo sapiens
atttttttaaacagggctaaaacgataataattagcagaataaagacatatcggattttcatttcctttcctccttttcccaaccccttcacaaccaaacagcgagaccgcggtcggcacatgctttaactcctcccggacccccgaggaccgctccatgccccccactttctgctccagcgtttttattttcacccaataaagttcgaggattattttttattttttttgtttttttaatgaaccctctcgttttacttggatgtgatcagctgtaagtaaaataaaagcaaaacaaaaaagaggcgaagatcgagtaggaactgcaggggaaatggaaagtccctgacaggctggatgaaatgagatccccatgtagcaattgccatggaaacctgtgactcccctcctatctcaaggcaggaaaatgggcagagcacatcaaagctatgtggaacgacacaacttgataatgaggtgccagagaaagttgcagggatggagcctgacagggaaaacagctccacagatgacaacctgaaaacggatgagcgcaaaagtgaagccttgctgggtttcagcgttgagaatgcagctgccactcaggttacctcagcaaaggagataccctgcaacgaatgtgccacttcttttcccagtttacagaaatacatggaacaccactgccctaatgcccgccttcctgtcctgaaggatgacaacgagagcgagatcagcgagttagaggacagtgacgtggaaaatctaacaggggagatcgtttaccagcctgatgggtcagcatatataattgaggactccaaagaaagtgggcagaatgcacagactggggcaaatagcaaactcttttctacagcgatgttcctggactccctggcatctgctggagagaagagtgatcagtctgcttctgcacctatgtcgttctacccacagatcatcaacacttttcatatcgcttcatccctcgggaaaccatttacagccgatcaggctttcccaaatacctcagcattagcaggagttggtcctgtgttgcacagtttccgtgtctatgatctccgacacaagagagagaaagactatctaaccagtgatggctcagccaaaaactcctgtgtgtccaaagatgtccctaacaatgtggacttgtccaaattcgatggttgtgttagcgatgggaaaaggaaacctgttttaatgtgtttcttgtgcaagttgtcttttggttatatcaggtcatttgtaacccatgctgtgcatgatcatcggatgaccctcaatgacgaggagcagaagctcctcagtaataaatgcgtctccgccataatacaggggattggcaaagacaaagaacctcttataagctttctggaaccaaaaaaatccacttctgtttatccccatttttctactacaaacctcataggacccgatccaaccttccgcggtttatggagcgcttttcatgttgaaaatggtgactctttgccggctggctttgccttcttaaaaggaagcgcgagcacctcgagctcagcagagcagccgctggggattacccaaatgccaaaggctgaagtgaatctgggggggctgtctagtttagtagtgaacaccccaattacctctgtctccctcagccactcatcgtctgagtctagcaagatgtcagagagcaaagaccaagagaacaactgtgaaaggccaaaagaaagcaacgttttacacccaaacggggagtgccctgtcaaaagtgaacccactgaaccgggagatgaggatgaagaagatgcgtactccaatgaacttgatgacgaggaagtattaggtgaactcaccgatagtattggtaacaaagatttccctctcttaaaccaaagcatttctcctttatcatccagtgtgctaaaatttattgaaaagggtacctcgtcctcctcggcgactgtttctgatgacacagaaaagaaaaaacagactgctgctgttagggccagtggcagtgttgctagtaactatggcatcagtggcaaggactttgcagacgcaagtgccagtaaagacagtgccacagctgctcatccaagtgaaatagcccggggagacgaagacagttcagccactcctcaccagcatggctttaccccgagtactcctggcacaccagggcctggaggagacggctcaccgggcagtggcatcgagtgtccaaagtgcgacactgtgttggggtcttcgaggtctcttggtggtcatatgactatgatgcactcgaggaactcatgcaaaaccctcaaatgtcctaaatgtaactggcactacaaatatcagcagaccctggaggcccatatgaaggagaaacaccctgagccgggtggctcttgtgtttattgtaagactggacagcctcaccccaggcttgcccggggtgagagttacacgtgtggctataaacccttccgttgtgaggtttgtaactactctaccactaccaaaggcaacctcagtattcatatgcagtcggacaagcacctgaacaatgttcagaatctccaaaatggcaatggtgagcaggtgtttggccactctgccccagcccccaacaccagcctcagtggctgcggaacaccctctccgtccaaacccaaacagaaacccacctggcggtgtgaagtttgtgattatgaaaccaatgtcgccaggaacctccgaattcatatgaccagcgaaaagcacatgcataatatgatgcttttgcagcagaacatgaagcagatccagcataatctgcacttgggcctcgccccggcggaagcagagctttatcagtactacctagcccagaacataggcctgaccggaatgaagctggaaaaccctgccgaccctcagctgatgatcaatccattccagctggatccagcgacagcagcggctttggcaccagggctcgtaaataatgagctgccgcctgaaatccggcttgccagtggtcagctaatgggtgatgacctgtccctccttactgcaggagagctgtcaccttatatcagtgacccagcgctgaagctattccagtgtgctgtttgcaacaaattcacctctgacagcctggaggccctaagtgtgcatgtgagcagtgagcgctctctccctgaagaggaatggagggcagtaattggagatatctaccagtgcaagctctgcaactacaacactcagctcaaagccaacttccagctacactgcaagactgataaacatatgcagaaatatcaactggtggctcacattaaagaagggggcaaaagcaatgagtggaggttgaagtgtattgccattggcaaccctgttcacctaaaatgtaacgcctgtgactattacaccaacagtgtggataaattacgcttgcataccaccaatcacaggcacgaggcggccctgaagctctacaagcacttgcagaagcaagagggtgcagtgaatcccgaatcctgctattactactgtgccgtgtgtgattacaccaccaaggtcaagttgaatctggtacaacatgtccgttcggtgaagcatcagcagactgagggcctacggaagctccagctccaccagcaaggcctggcaccagaggaggacaacctcagtgagatcttttttgttaaagattgcccaccaaatgagcttgaaactgcctcattgggagccaggacttgtgatgatgatcttacagagcagcagttgagatcgacctcagaagaacaaagtgaggaggcagaaggagctattaagcctacagcagtggccgaggacgatgaaaaagacacaagtgagagagacaatagtgaaggcaaaaactctaataaagactctgggataatcacaccagagaaggaactaaaagttagtgtggcagggggtacccagccactcctgctggcaaaagaagaggatgttgcaacaaaaaggtcaaaacctacagaggacaataaattctgtcatgaacagttctatcaatgtccttattgtaactacaatagtagggaccaaagtcgtatccagatgcacgtcctatcacagcactcggtgcagccggtcatctgctgtcctctctgtcaggacgtcctcagcaacaaaatgcatctccaactgcatctgacgcatttgcacagtgtgtctccagactgtgtggagaagctgcttatgacagtgcctgtccctgatgtgatgatgccaaacagtatgctactgccagcagctgcctctgagaaatcagagcgggacacacctgcagccgtgacagctgaggggtctgggaaatattcaggtgaaagtccaatggatgacaaaagcatggcaggtctcgaggattcaaaggctaatgtggaagtaaagaatgaggagcagaaaccgactaaagaacccttggaagtctcagaatggaataaaaatagcagtaaggatgtgaaaatccccgacacactgcaagatcaattaaatgaacagcaaaaaaggcaaccgctctctgtttctgaccgtcatgtctacaagtatcgctgtaaccattgtagcttggctttcaaaactatgcagaagcttcagatacattcccagtatcatgcaattcgggctgcgacaatgtgtaacctctgccagcgcagtttccgtacattccaggctttaaaaaaacacttggaagcaggccaccctgaactgagtgaagctgaacttcaacagctatatgcctccttgcccgtgaatggagaactgtgggcagagagcgaaactatgtcccaggatgaccatggcctagagcaggaaatggagagagagtatgaggtggaccacgaagggaaagcaagtcctgtaggaagtgatagtagctctattccagatgacatgggctctgaaccaaagcggaccttaccttttagaaaagggcccaattttacgatggaaaaattccttgatccatctcgtccatataaatgtacagtgtgtaaagagtcattcacccaaaagaacattctcttggtccactataattcagtttctcacttgcataagctgaaaaaagttttgcaggaagcctccagtcctgtcccacaagaaaccaacagcaacacagataacaaaccctacaagtgcagcatctgcaatgttgcatacagccaaagctcaacattggaaatccacatgaggtctgtgctccaccagacaaaggctagggctgcaaagctggagcccagtggtcatgtggctggtgggcacagcattgcagcaaatgtcaacagccctggccaggggatgttagattccatgagtttagcagctgtaaacagcaaagatacccatttagatgccaaagaattaaataaaaagcaaactcctgatttaatctctgctcaacctgcacatcacccaccacagtcaccagcacaaattcagatgcaactacagcacgaattacaacagcaagccgcattctttcagcctcagtttctaaacccagcctttttgcctcattttcctatgaccccagaagcactgctgcagtttcagcagcctcagtttctctttccattttatatacctgggacggagttcagcttggggccagatttgggcttgccaggctctgccacatttgggatgcctggcatgacaggaatggctggctccttgcttgaagacctaaagcagcagattcaaacccaacatcacgttggtcaaactcaactccagatactacagcaacaagcacaacaataccaagccacacagccccagctgcagcctcaaaaacaacagcagcagccaccacctccacagcagcagcagcaacagcaggcaagcaaattattgaaacaagagcaaagtaacatagtgagtgcagactgccaaatcatgaaggatgtgccatcttataaggaggcagaagatatttctgaaaagccagaaaaaccaaagcaggaatttataagtgaaggtgaaggactcaaagaaggcaaagacacaaagaagcaaaaatccttggaaccatccatcccaccaccccgaatagcttcaggggccagaggaaatgctgccaaagcgttattggaaaactttggttttgaactggtcattcagtataacgaaaacaggcagaaggtacagaagaagggcaaaagtggtgaaggcgaaaacactgacaaactagaatgtggaacatgtggtaaattgttttccaatgttcttattttaaagagtcaccaagaacatgtacatgggcaattttttccatatgcagcgctagaaaaatttgctcgtcaatacagggaggcctatgacaagctttatccaatttctccatcttctccagaaacgccgcccccgccacctcctcctcctcccttgcctccggctcctccacagccttcttctatgggtcctgtaaagatccccaacacggtttctactcctctgcaagctccaccacccactcctcccccaccaccaccacctcctcctcctcctcctcctccccccccacctcctccaccttctgctcctccacaggtccaactgccggtttctctggacctgccgctctttccttccattatgatgcaacctgtgcaacaccctgcgcttcctccccagcttgccctgcagctgccacagatggacgcactctctgcagacctcacccaactttgccagcagcagctcggattagatcccaacttcttaagacattctcagttcaaacgcccacggacaagaattacagatgatcagctaaaaatcctgagggcttattttgacattaataattctccaagtgaagaacagatccaggaaatggcagagaaatctggcctctcccaaaaagttatcaaacactggtttagaaatacgctttttaaggaacgacagagaaataaagattcaccatacaacttcagtaaccctcctataacggttttagaagatatcagaattgatccacagcccacctctttagaacattacaaatctgatgcatcattcagtaaaaggtcttctagaacgagatttactgactaccagcttagggttctgcaagacttttttgacacaaacgcttacccaaaagatgatgaaatagaacaactctccactgttctcaatctgcctacccgggttattgttgtatggttccagaatgctcgtcagaaagcacgaaagagttatgagaatcaagcagaaacaaaagataatgaaaaaagagaactcactaatgaacggtacattcgaacaagcaacatgcagtaccagtgtaaaaagtgcaatgtggttttccccaggatctttgacttgattacgcatcagaaaaagcagtgttacaaggatgaagatgatgatgcccaagatgaaagccaaacagaagactccatggatgccactgatcaagtggtatacaagcattgcacagtgtctggccaaacggatgcagctaaaaacgctgctgcccctgcagcaagttctggctctgggaccagcacccccctgattccatcacccaaaccagaacctgagaagacttctccaaaacctgaatatcccgcagaaaagccaaagcagagtgacccctctcccccttctcaaggcaccaaaccagccctgccattagcatcgacttcctcggacccaccacaggcatccacagcccagccacagccacagccacagccaccaaaacaaccccaacttatcggaagacctccctcggcctctcaaacaccggtcccttccagtccactgcaaatttccatgacgtctctccagaacagtctacctccacagttactacaataccaatgtgatcagtgtacagttgccttcccaactctggaactctggcaggaacaccagcacatgcacttccttgctgctcaaaaccaattccttcactctccgttcttggaaaggcccatggacatgccctacatgatatttgaccccaacaatccgctgatgactggacaactgctgggcagttccctcactcaaatgccccctcaggccagttcctcccacaccacagcccccacaacggttgctgcttccctaaaaaggaaactagacgataaagaagataataattgcagtgaaaaagaaggagggaatagcggtgaagaccaacaccgagataaacgcttgagaaccacgatcaccccggaacagctggaaatactctatgaaaaatacttgctggattccaatcctaccagaaaaatgcttgatcatattgcccgcgaagtcgggctgaaaaaaagggtcgtgcaagtctggttccagaatacacgagcgcgggagaggaaaggccagttccgggcggtgggtccagcacagtctcataaacggtgtccgttttgccgagccctgtttaaagcaaagtcggccttagaaagccacattcgctctcggcactggaatgaaggaaagcaggcaggttacagcttgccaccaagccctttaatatccaccgaagatgggggagaaagcccacagaaatacatctattttgattacccatctttgccattaactaaaattgatctatcaagtgagaatgaattggcttctacagtgtcaacacctgttagtaaaacagcagagctgtcaccgaagaatcttttaagcccttcttcttttaaagcagagtgttctgaggatgtagagaatttaaatgcccctcctgctgaggctgggtatgatcaaaataaaaccgattttgatgagacttcatcgattaatacggcaatcagtgacgccaccaccggagacgagggaaacactgaaatggaaagcaccacaggaagttccggagatgtgaaaccggctttgtctcccaaagagccaaaaactctggatactctgccaaaacctgcaaccacacctaccacggaggtctgcgatgacaaatttctcttttctctcacaagcccatccatccatttcaatgacaaagatggcgaccacgaccaaagcttttacatcacagatgacccggatgacaacgccgaccgcagcgaaacgtccagcatagcggacccgagctccccaaatccattcggatccagcaatccctttaaatccaaaagtaatgatcggccgggtcacaagcgttttcgaacgcaaatgagcaatcttcaactcaaggttctcaaggcttgctttagtgactaccgaactccaaccatgcaagaatgtgaaatgttagggaatgagattggtctgcccaaacgcgtagtccaggtgtggttccaaaatgcaagggcaaaggaaaagaaatttaaaattaacatagggaagcctttcatgatcaatcaaggcggaacggaaggcaccaaaccagagtgtaccctctgcggggtgaagtactctgcccgcttgtccatcagagatcacattttctccaaacagcacatttcaaaagtgagggagaccgttggcagtcagctcgatcgggagaaagattacttggctccgaccacggttcggcagctgatggcacagcaagaacttgatcgtataaagaaagcttcagacgtgctgggcttgacggtacagcagccaggcatgatggacagcagttctctccacggcatcagcctgccaacagcctaccccggactccccggccttcctccagtccttctccccggaatgaacggtccatcctccttgccgggatttccacaaaattcaaacactttaacacctcccggtgcaggcatgcttgggtttcctacttcagctacttcgtctcctgccctgtctctcagcagtgcccccaccaaacctttgctgcagactccaccacctccaccacctcctcctcctcctcctccttcatcctctctgtcaggacagcagaccgagcaacagaacaaagaatctgagaaaaagcaaactaagccaaacaaggtgaaaaaaatcaaagaggaggaattagaggccaccaaacccgaaaaacaccccaaaaaagaggaaaaaatctcatctgctctttcagtgttgggcaaagttgtaggtgaaacacatgtcgatcctattcagttgcaggcattacagaatgcaattgctggtgacccagcttcctttataggcggacagttcttgccatactttatccctgggtttgcttcttattttacacctcagctccctggaacagtgcaggggggatacttcccacctgtctgtggcatggagagcctctttccttatggccctacaatgccccagacactggcaggtctgtccccaggtgcactgttgcagcagtaccaacagtatcagcagaacctgcaggagtccctgcaaaagcagcaaaagcaacagcaagaacagcagcagaaaccagttcaggcaaagacatccaaagtagaaagtgaccagccgcaaaactccaacgatgcttcagaaacaaaggaagacaaaagtactgctacagaaagcacaaaagaagaaccccagttagaatccaaaagtgcagacttttcagacacttacgttgttccattcgtcaagtatgagtttatatgcagaaagtgccagatgatgtttactgatgaagacgccgcagtaaatcatcaaaagtccttctgttatttcggtcagcctttgattgacccacaagagacagtgcttcgtgtcccagtcagcaaatatcagtgtcttgcctgtgatgtggctatcagtgggaatgaagcacttagccaacacctccagtcaagcttgcacaaagagaaaacaatcaaacaagcaatgagaaatgccaaagagcatgttagattattacctcactcagtctgctcccctaatcctaacaccacatctacctcgcagtctgcagcttcttctaataacacctatcctcatctttcttgcttctccatgaagtcctggcctaatatccttttccaagcgtctgccaggagagctgcttctcccccttcttctcctccttccctttccttgccttcaacggttacctcaagtttgtgcagcacctcaggggttcaaacctcactacccacagaaagttgttcagatgagtctgacagtgagctgagccagaagctagaagacttagataattctttggaagtgaaggctaagcctgcttctggcctagatggtaatttcaatagcatccgaatggatatgttcagtgtgtaggagtgaagacaggatcccgtgcttaaaaaaataaaaaataaaaaaataaaaaaaaaataagactttaactgcagttccaaagcttctctaacccaaaaattacagtaccaaatgattgactcaggattgtttttcccatattgatatgctggcaatataggatggtatgtaatggacagaactgatgcagatggttgaatgcgcttgtactatatgctaaaatatggaaaaggaaaaaaaaatctcacaagttcttttggaacttgtttcaagccaaaaactctcaagaaagcaaattgcacctcagctggattgatttccaaatgctagcatgtactgtatgggaggatgatccagatgtttcaaagagaatttctcttagtttagttaggtgtaattcagtagctttaaattctcaggtcagaacataacatttctcatttgttaaaagcagcaagaagcctggtaaaactgtgacttttccccaaacgtcaatctttattagaaagcattttctaggtgtgtttagtgtacaaagagactttataacccttactggacaacacacagatccttgagctcacgctgcaggatagtacagttttaccgcagagggaatctggaacagtggaatcatgtgtctgccctgtgtattgcagtttgtattgccacaagctatatttataccagtgtcacccttttcttgtagaatatactaataatctgtgccaactctaccttctcacttttacctctgacgtcattctttttttctgaaagaggtaataattctagttttgatagactctgaggattatgtgaacaggacatttttcatttgtgaatttaatgctatactgtcaaggtacttgcttgtgtctgaactctagtgcacttatgattttgtagaccatgtgaaatttaataagataccttttttttcctttctttgtgtgtagtgcagcaacagtttggtctgcatttgttagaagtttaactcctaacaacccaaagacctatttaacaattggtgcataaatgaaagtagtactgtatacttgaaactgtttaagtacaagttgaacaaaaattatgaaaaggtatatttgcttctcgggaaagcaaagaagctgctttaaaaaataaaaaggggactaaaaatttgttttgtataaagaggttagccctgcgcacgtaggactgaattcagtgatatccctatacactgccatttagtggataggttattgtacttccattcatactctgggcacttgtgttgtattgttctgttacatactttttttaacctgttttgttttatcatatatgcattaaaagtattatctttatcaacatttgctgctactgtgttaacatttttgttttgcttgccatgaatttcaacttccaccacccagtgaattgatttataaattgctatgctttgctgtttttctgttgctgtggaacttaaagaatgtgaaagctgtcaaagggtattttacgaatcacttttgtgtttgatatagtaaaacaatgtgattcattccaaagtaacagaaggttatttgtaagaaagttaaaggcttgtgaacaaagaaagctaagctgttgtacatatttgtagttggctgtgcatggtacaaatttattaatatgaagaaatgcaaaatgtattgcttttgatatttctcttccgagatgaacaagtagcatgtaatgcaactgtttgacagtttaactcaagtcatgcttcaaactgttttaatgatcaaatcaagacacatttcattttacattttattattgtacagtttttgtttcggatgatgatcacagcaatctttattctatacattttatgtgaacttttttaatgtctttaatttggattttttttttttttagtattttaacatttattttaatcctgaagacacttttttgattgtgtttcgtaagagacaacatggcctcctaaggtgcaatcctgccgctatagtgagctaatgtcctgaatccaaaggcttcagaaaattgcttttgcctttttcatgaatgttaagcagcagcattgtgagatcgatctgtcctggcagttaacacgatgtgcaacagtgtgttagcatggaacagaacgcttttcacaaaacaaaggactgttttacaaatgattattccgacagtgtgtcgacataaacttttacaactgcacagcagccaaaaaaagaaaaaaaaaagaaaaaaaactttaactggatggacgttgttagggtgagaaataaaaggacagcctccaaaggttgagaatgagaattgttttttcctggatatcaaagggattatcacagcgcaatcattgtctacacaacatgtactctcaacgcctgggttacataggaaatgcaccctgaggttttaataaaagcccctatggctataactttaaataaactaaaccaaaaatgttattgatgttttatatatagagagtagtctcattagtttttgttactgtaatgtttgaagtctcaaatgcaccgtattacggtaaataacatggttttgaaaacttttttttattttgtcacagacctgttgtcatagttgaaatgatgtttattgtagatggtatttgaacttattcttctggaaatagttcatcaagtatgtttgttgctcattgtgatacattaaaaactgtatctacatatttaaaaaaaaaaaaaaaaaa

SEQ ID NO: 1155 - DNA, 9243 bp, Homo sapiens
atttcatttcttccactaaagcgtttgcggagacttcaaggtataatctatcccagatcctttcccagagagaaacttggcgatcacgttttcacatgatgctcacgctcagggcgcttcaattatccctccccacaaagataggtggcgcgtgtttcagggtctctcgtctctctcctacagaaaagaaaaagaaaaaaatgtcattagaagaggcgtaacacgtcagtccgtccccaggtttgtgtttcctggagtggccgaaagagatcagttctaacctgctctgcaggaataacggtcctgcctcccgacactcttggcgaggtttttgtacagtttgctccgggagctgtttcttcgcttccacctttttctcccccacacttcgcggcttcttcatgctttttcttctcaccatttctggccaaaactacaaacaagacttcgcagatcgagcctgcgtgctgccgaagcagggcgccgagtccatgcgaactgccatctgatccgctcttatcaatgaagcagccgatcatggcggatggcccccggtgcaagaggcgcaaacaagccaatcccaggaggaaaaacgtggtgaactatgacaatgtagtggacacaggttctgaaacagatgaggaagacaagcttcatattgctgaggatgacggtattgccaaccctctggaccaggagacgagtccagctagtgtgcccaaccatgagtcctccccacacgtgagccaagctctgttgccaagagaggaagaggaagatgaaataagggagggtggagtggaacacccctggcacaacaacgagattctacaagcctctgtagatggtccagaagaaatgaaggaagactatgacactatggggccagaagccacgatccagaccgcaattaacaatggtacagtgaagaatgcaaattgcacatcagattttgaggaatactttgccaaaagaaaactggaggaacgcgatggtcatgcagtcagcatcgaggagtaccttcagcgcagtgacacagccattatttacccagaagcccctgaggagctgtctcgccttggcacgccagaggccaatgggcaagaagaaaatgacctgccacctggaactccagatgcttttgcccaactgctgacctgcccctactgcgaccggggctacaagcgcttgacatcactgaaggagcacatcaagtaccgccacgagaagaatgaagagaacttttcctgccctctctgtagctacacgtttgcctaccgcacccagctcgagcggcatatggtgacacacaagccagggacagatcagcaccaaatgctaacccaaggagcaggtaatcgcaagttcaaatgcacagagtgtggcaaggccttcaaatataaacaccatctgaaagaacacctgcgaattcacagtggtgaaaaaccttacgagtgcccaaactgcaagaaacgtttctcccattctggttcctacagttcgcacatcagcagcaagaaatgtattggtttaatctctgtaaatggccgaatgagaaacaatatcaagacgggttcttcccctaattctgtttcttcttctcctactaattcagccattacccagttaagaaacaagttggagaatggaaaaccacttagtatgtctgaacagacaggcttacttaaaattaaaacagaaccactagacttcaatgactataaagttcttatggctacacacgggtttagtggcactagtccctttatgaatggtgggcttggagccaccagccctttaggagttcatccatctgctcagagtccaatgcagcacttaggtgtagggatggaagcccctttacttgggtttcccaccatgaatagtaatttaagtgaggtacaaaaggttctacagattgtggacaatactgtttccaggcaaaaaatggactgcaaggctgaagaaatttcaaagttgaaaggttatcacatgaaggatccatgctctcaacctgaggaacaaggagttacttctcctaatattccgcctgtcggtcttccggtagtgagtcataatggtgccactaaaagtattattgactatacgttggaaaaagtcaatgaagccaaagcttgcctccagagcttgactactgactcaaggagacagatcagtaatataaagaaagagaagctacgtactttaatagatttggtcactgatgacaaaatgattgagaaccacaacatatccactccattttcatgccagttctgtaaagaaagttttcctggccccatccctttgcatcagcatgaacgttacctttgtaagatgaatgaagagatcaaggcggtcctgcagcctcatgaaaacatagtccccaacaaagccggagtttttgttgataataaagccctcctcttgtcatctgtactttctgagaaaggaatgacaagccccatcaacccatacaaggaccacatgtctgtactcaaagcatactatgctatgaacatggagcccaactccgatgaactgctgaaaatttccattgctgtgggccttcctcaggaatttgtgaaggaatggtttgaacaacgaaaagtctaccagtactcaaattccaggtccccatccctggaaagaagctccaagccgttagctcccaacagtaaccctcccacaaaagactctttattacccaggtctcctgtaaaacctatggactccataacatcaccatctatagcagaactccacaacagtgttacgaattgtgatcctcctctcaggctaacaaaaccttcccattttaccaatattaaaccagttgaaaaattggaccactccaggagtaatactccttctcccttaaatctttcctccacatcttctaaaaactcccacagtagttcatacactccaaacagcttctcttctgaggagctccaggctgagcctttagacttgtcattaccaaaacaaatgaaagaacccaaaagtattatagccacaaagaacaaaacaaaagctagtagcatcagtttagatcataacagtgtttcttcctcatctgaaaactcagatgagcctctgaacttgacttttatcaagaaggaattttcaaattcaaataatctggacaacaaaagcactaacccagtgttcagcatgaacccatttagtgccaaacctttatacacagctcttccacctcaaagcgcatttccccctgctactttcatgccaccagtccagaccagtattcctgggctacgaccatacccaggactggatcagatgagcttcctaccacatatggcctacacctacccaactggagcagctacttttgctgatatgcagcaaaggagaaagtaccagcggaaacaaggatttcagggagaattgcttgatggagcacaagactacatgtcaggcctagatgatatgacagactccgactcctgtctgtctcgcaaaaagatcaagaagacagagagtggcatgtatgcatgtgacttatgtgacaagacattccagaaaagcagttcccttctgcgacataaatacgaacacacaggaaaaagaccacatcagtgtcagatttgtaagaaagcgtttaaacacaagcaccaccttatcgagcactcaaggcttcactcgggcgagaagccctatcagtgtgataaatgtggcaagcgcttctcacactcgggctcgtactcgcagcacatgaatcacaggtattcctactgcaagcgggaggcggaggagcgggaagcggcggagcgcgaggcgcgcgagaaagggcacttggaacccaccgagctgctgatgaaccgggcttacttgcagagcattacccctcaggggtactctgactcggaggagagggagagtatgccgagggatggcgagagcgagaaggagcacgagaaagaaggcgaggatggctacgggaagctgggcagacaggatggcgacgaggagttcgaggaggaagaggaagaaagtgaaaataaaagtatggatacggatcccgaaacgatacgagatgaagaagagactggagatcactccatggacgatagttcggaggatgggaaaatggaaaccaaatcagaccacgaggaagacaatatggaagatggcatgtaataaactactgcattttaagcttcctatttttttttccagtagtattgttacctgcttgaaaacactgctgtgttaagctgttcatgcacgtgcctgacgcttccaggaagctgtagagagggacagaaggggcggttcagccaagacagatgtagacggagttggagctgggtattgttaaaaactgcattatgcaaaaattttgtacagtgttaaggcctaaaaactgtgtggttcagagactaattcctgtgtttaatagcatttatactttaagcacaactagaaaattgtaagaattgcactctacttatgtatcactacaaactttaaaaaactatgtctaatttatattaatacattttaaaaaggtgcccgcactaccatacatcagtatttttattattattattgttattcctttttaatttaatgtgctcgcactacaatgcatcagtattatgattcctctgtactttcctttcgctattcatcaatttcccattttttttttcagcttaagtaaccacacaattttaggcctcaatttttttttttttctgtgaaggaacttgaagtgatgcatgtgtgaatttaagataccgaagtcttaaagtgacctggacgtgaaggaaaaagtaagatgagaaataaagaaagcctttgtaaggtggttttaaaagccttatatgcaaaccttttaatctgtgtttctgcaagtgccatccttgtacagtgttaagagggtaacatgggttacctttgcaccagcttcagtgttaagctcaccctgttctttgaagcacccatgtcagtattagaagaataggcagcagttccttagtttacatatgtttgtgcaattattttctgtacttttttgttcattaattttgtcagtattacaccaaactgtttttgcaacaaaaaaattttttttgcattcatttaattttaggtcaaataacattttatttatgtggctcattttatatttcctaattttatttatttcatactgtagtgtacagtattatagttcttcaatatatagatatattttagtaaaaaaggaacatgacgttgatcatttgggcaaattttacgtaaagagaagagcatttattgtgttttggaacattaattgtgagatgggatttttcaattttattattttatttttgtttttttccaattactggaaattccaaatttgggaacttttgatacgatcttgtgaaaacactgtattttcgactgaaaattccactttcttcatcttgttttttagctaaaaagagggactgttaaatacaatgtatgataccatgacaaaaatctttcctgaattgtctttgtaaaagtattattgaattttcaatttgtaatttcttttgaaaatgaccatgctcgaataaaaatgtagccaaactaagaatgtagttaatgagttctgtacttttagagagttttccttcaatgaccattaacatgtaacatgctttatgcttataataatgctaattatgtttttttcatataattttagtttagcaataattttgactggtaccaataactgttttttaaaattccatacctatgtacagcaattttacagcttttctcaactgatcctgattccagattgtgtatttttatgtgaggttatattattcaaatttagtctatttactttacagacatttctacttttgcattacgagtatttagagattatgtgttaaaaattcacttctctgtccaaggggtctttgtgatttattcaaaaaaaagtctaatttcaaaaagacagctattattcagtgttatttataatatgtaaccttttttaaaggattgggatagtttatctcactttttgaaatgcagacagtagtttaccgtttatctgaaactagaaggcgtgggtgggagaggaaaagctaaaagcaaatgctaacaaaaataaccgtgattttctaagacagtttttcagtttttacaagatgaccctaatattcagaatatgaatgtattcgtaggttttacataatgacttttatcaagaaactagattctgcttcttaaatctaattgccaagtgaagaataacagaaaaaacagattaccttatcaaatttacagctcttgaatatacagaactataatatagtagctgtccatgtattttttctactttagaatcaaagaagaaaagcatcattttgctattaaatttgctaaaattttgagtatgatatttccagttggcaagaacaacatatttatatttattccttagccataataccactttcctaaatttcacaaaagtcattctttgcaacttgaaactcaatagaaagtgtgtatgtgtgtgtgtgtatatatatatatatatacacacacacacatacacagaaaggatgtaatgaagatacagtaatagttgagcagacctttttagaaaaacatgtttttagctctatcttcaaactttctggcagagggggtggggggggcagggggaggagtggcatcaaaatgctatgcctcctgttatccacagcctagagtttttatatttggaaagtttagaaaattctatcctcgtttctccttctttgaatggcacaaataaatacactacataaatttttctggtttgaaaggctctaggcgataactttattaattcaacctgaaaatatcaagccattaaattttgtccgggtagaataaatccctgtggcctcttttaaagcaatgtaggtctctgttgcccatggggcatatctgtgtcccaatccacaagagataggaccaacaaacaatgaatgtgcaacctaactctttctccttggaaagaagaaagtgtgcacgaagtagaggagggtgggcagaccctgccttgcccctcctgttacccccttctctgtcatttgttcctaactccatttcataggcaggctcagaatacctgagtctgaaaatatcaggataacacttgtgaattgtgacaatcactacaatgtcccatatctgaggagttttttttaatgctatttatccgctggacacgattgcacattagggctgcataatcctctaactctagggaaaaataaaaacttttgatttgtcttaagattcttctccaaggtcgcaaacaagaaattcccctccacaaccaagagatgtgcattttagtaacatcagatgtgttcttctgttttatcaactacttactcttcccacacgcttagttctaaatctaacctttcccccctcgaatagggggcaggggaggatgaggaaacactggaacaactgaacacccctgcccattttctccaagagccttttgtattctagcatatctgtgcaatcttttcttttttcttcacatgacactgtaagcttaggcctgaaataactgggaagagagatgcgtatcagaatttctccgcaagagctaaacaaaacatacatcttccttagcatgaattggactgggggcggagtgggagggcttggaggaaaggggaaagaagggactatatttgaataaatatgaataaatgtattagatacttttcacaatcagataacttttaaaaaggtcattttttatctttctaataatgtaagccttaataaaagcaaatcttagtcacaaatttgaggagactgcccaataataagtttacatgtatttgaactgaaaaattgttaaccatgcttttgctccaagatgtgtgaggccattcaggggctgtagggccctggatatacacacaaacaagtgtgtgtatatctggagccccacacattgtaataaacacagctgcatttatttgactatgtgatcccatgtacatgtaaaaacattcaaacaaacacactcagcggatttatttattgtgcaatggggcaattattcaaataaacatgctcaatgcaattatttgaatctcacattgcatgttcatcaatcatagcactaaaaaaagagggggaaaaaacaccaaagaattcacatggggaaaaaatatatatatgaaaaccaccttattatagattttatagggcagctgaggttatggctcccttcttaactgtaactcaactattctgtattcaatgacatttgtttctaatgattaattggttcactcacttgatcatataatagcaaactttataaacctgtattgtgtagagatgtgaaatctctatatttcaagagcagaagagttctttctagacaccttacatcaagggacactggtccaattattatcgcttatataagcactcctataaattctgaaaaattttatacatgcaacaaaacattcctacatttgaagacattaagaaaaatcacaggtgactcatctgatcattctatatattaataaatattatgacatatatgtgaacacatcacaaatcatattggtgtaccaagaggcaatttatgcctctcttaagtatgtactgacataacctaatatactaaaatgggaaggggcttttagtcactgaaatatgcatcgtgtaacaaagatgaagaaaatacatggcttgtgcccatcataaaaaaagattcagactgaaggcttagctttggttttttcaattaaattgttaaactgtgcacagtgatttttttttagaacttgagacatttgtgatgttggctgtttaaatctttgttaccttcgctgtgaattgaaattgtacatatttagtaaatcatgcagacaaaacaaactttttagacaatatttttattggagagttttcttttcctgtatccatgttaaaaaaaaaaaagacctcctttcccaaaataaaaatgtcaatactaaatttaaagaagtataaaggaatgattgcttcctttagagcaaaatatttaaataaacatggagataattggcaacatgttctttttgggctagtaggctgtgtccaattttttgggtctgatgtttcagagggcctctgtttcagggttgaagatgatatattaatctcggaattaaacaaatgctattaaataac

SEQ ID NO: 1156 - DNA, 5455 bp, Homo sapiens
gacaaaccctcaggaagccctggccaacccccttctccagccccatctccagtccctgaacctgatgcccaagctgaagacgtagctcctccgcccaccatggctgaggaggaagaggggaccactggggagctccgctctgcagagccagctccagctgactctcgccaccctctgacctatcggaaaaccaccaactttgccctggacaagtttctcgaccctgcccggccctataagtgcactgtgtgtaaggagtccttcacccagaagaatattctgttggttcattataattctgtctcccaccttcacaagatgaagaaggctgccattgacccctctgcccctgcacggggagaggccggtgccccacccaccaccactgctgccacagacaagccctttaagtgcacagtctgcagagtctcctacaaccagagctccaccctggagatccacatgcggtcagttctgcatcagactcgctctcggggaaccaagactgattccaagattgaagggccagaacgcagccaagaagagcccaaggaaggcgagacagagggggaggtgggcactgagaagaagggccctgacaccagtggcttcatatctggattgcctttcctgtcccctcccccacctcccttggacctgcaccgattcccagcccctctcttcaccccaccagtcctgccccccttccctctggtgcccgaatcactgcttaagctccagcagcagcagctgctcctgcccttctacctccacgatctcaaggtggggcccaagctgacactagctgggcctgcacctgtgctgtccctgccagctgccacccctcctcctccaccccaacctcccaaggctgagctggctgagcgggagtgggagcggccccccatggccaaagagggtaatgaggcagggccttcctcaccccccgacccattgcccaacgaggctgcccgcactgcagccaaagcccttctagaaaactttggctttgagctggtgatccagtacaatgaagggaagcaagctgtgccccctccccctaccccacccccacctgaggccctcgggggtggggacaagctggcctgtggggcctgtgggaaactcttctccaatatgcttatcctcaagacacacgaggaacatgtccaccgccgctttctgccctttgaagccctgagccgttatgctgctcagtttcgaaagagctatgacagcctatacccgccccttgcagagcctcccaaacctcctgatgggtctctggattcacctgttccccatctgggcccacccttcctggtcccagagcctgaggcaggggggacccgtgcccctgaagagcgaagtcgagcagggggacactggcccatagaagaggaagaaagctccagagggaatcttcctcccctggtgcctgccggccgccggttctccagaaccaagttcacagagttccagacccaagccctgcagtctttctttgagactagcgcctaccccaaagacggagaggtggagcgactcgcaagtctgttgggtctggctagccgtgtggtggtggtgtggttccagaatgcccgccagaaagcacgcaaaaatgcctgtgagggtgggtccatgccaaccggaggaggcactgggggagcctccggctgcaggcgttgccacgccactttctcctgtgtttttgagttggtgcgccacctcaagaagtgctatgatgaccagacccttgaagaggaggaggaagaggcagagagaggggaagaggaggaagaggtggaagaagaagaagtagaggaggaacagggccttgaacctccagcagggcctgagggcccattaccagagcctccagatggggaggagctgagccaagcagaggcaacaaaggcaggaggcaaagagcctgaagagaaggctactccatcaccttccccagcccatacctgtgaccagtgtgccatttctttctccagccaggacctcctgaccagtcaccgccgactacatttcctgccatctctgcagcccagtgctcccccccaactcctagatctgcccttgctggtgtttggggagagaaaccccctggtggcagccacctcaccaatgccaggtccacctctcaaacggaagcatgaggacggcagcttgtctcccacaggcagtgaagcagggggaggaggggagggcgagccccccagggacaagcgcctgcgcaccaccatcttgcctgagcagctagagatcctgtaccgttggtacatgcaggattccaacccaacacgcaagatgctcgactgcatctccgaggaggtggggctcaaaaagcgagtggtacaggtctggttccagaataccagggcccgggagaggaaaggccagtttcgaagcacccctgggggggtgcctagtccagcagtgaaaccgcctgccacagccacccctgcatccttgcccaagttcaacctcttattaggcaaggtagatgatggcactgggagggaagccccaaagagggaagcacctgcttttccctaccccactgccacgcttgcttctgggccccagcctttcctaccacctgggaaagaggccaccaccccaacaccagagccacctctacctctcctacctccccctccacccagtgaggaagagggcccagaggaaccacctaaagcttctccagagagtgaggcttgcagtctctctgcaggagatctgagtgattcatctgcttccagcctagctgaaccagaatcccctggggctggagggaccagtgggggacctggaggtgggactggggttccagatggaatggggcagcggcgctacaggacccagatgagcagcctgcagctgaagatcatgaaagcctgctatgaagcttaccgcacccccaccatgcaggagtgtgaggtgctgggagaggagattgggctgcccaagagagtcatccaggtctggttccagaatgctcgtgccaaggaaaagaaggccaaactacaggggacagccgctgggagcactgggggcagcagtgagggcctcttagcagcccagcgcactgactgcccctattgtgatgtcaagtatgatttctatgtctcctgccgaggccatctcttttcccgtcagcacctggccaagctcaaggaggcggttcgagcccagctgaagagtgaaagcaagtgctacgacttggccccagcacctgaggctcccccagctctcaaggccccacctgccaccacacctgcctccatgcccctcggggctgccccaaccttgcctcgcctggcgccggtcctcttatctggcccagctctggctcagcccccgctgggcaacttagctcctttcaattcaggcccggcagcctcctcaggcctcctcggcctcgccacttcggtcctgcctaccaccacagtggtccagactgctggcccaggccgccccttacctcagagacccatgcccgaccaaaccaacacctccacagcaggcaccactgaccctgtcccaggccctcctactgagcccttgggggacaaggtctccagtgagcgaaagccagttgcaggccccaccagctcctccaatgatgccctcaagaacctcaaagcattgaagaccactgtcccagccctgttggggggccagttcctgccctttccattgccccctgctgggggaacagcaccgccagctgtctttggcccccagctacagggggcctacttccaacagctctatggcatgaagaaggggctatttcccatgaaccccatgatacctcagaccctcattgggctgctccccaatgccctcctccagccgccaccccagccccctgagcccacagccacagcacctccaaagcctcctgaactgcctgctccaggggagggggaagctggtgaggttgatgagctgctgacaggcagcactggcatctccaccgtggatgtaacccatcgctacctgtgccgccagtgcaagatggcatttgacggggaggccccggctactgcccaccagagatccttctgcttctttgggcggggctctgggggctccatgccacccccattgcgggtgcccatctgcacctaccactgcctggcatgtgaggtgctgctgagtgggcgtgaagccctagcctcccacctgcgctcctcggcccacaggcgcaaggcagccccacctcaagggggcccacccatctccatcaccaacgccgccactgctgcctcggctgctgtggcttttgccaaagaggaagcaagattacctcacacggactccaacccaaaaactacgactacctctacacttctagctttataaacagattaaccaagatggggagaggggagggcctcagggctccctcttttaccccaaggggtgtttggtgggagctcaaatccctcaccccaccccctggccccgcccacctcacaggaactgttcagttcccaccctcagtgggcaccacacaccccacttccagcagagtcctgcctcctcccaatccccacagacacacacattgatcctcctcctcagctccttgcagatgtagcccttgcccatcttcacagacacatacacccatcttggcaccctgattattcatacatgtctgcctaccacacacaaaatatatccttggttctatcttccttttcctcactgaattcccagctccccatccccataaatgcatacacatacatgcacacacacacgttatcccatgatgttccactgagaaaacaccaaaaaattttgaaaaagaagataaaaagaagaaacgaaaaagaaagcccaaggcaaagaagggggaaggaaaacaaacttcgccactctctcttctccttcctaaccctttgtctagagcaccacaccgctcacaaactctttccaaatgctcagttggctcccaaagttggagcctggcatgggcagggagcccacaaaactctaaccaaactggaggctggcatgggagaagtgcttctggttcactcttcctaccctctccctcctaaccctctccttgcctgacaggggagcccctgtggcctggactctaggggatgccgccaccagaaacccctctgccaatccctaccttgcaccctgggaactgcagtaacttattctcaaaggctttaaacacagagatcctctcagcggccgtgggcctgccccttgtcctagccctgccacgtgagggtccagcctccagggacaggcactgcccaccaacggcaaatccaaagttctttcaaaaaaaaaaactgaaacacaaccaaaaaagcaagagcgagagagagtacgtgcacacgcgcacaaaagagagaaacggacaccagaggaatgaactaaagaaaaacgtaaacttggaaaatac

SEQ ID NO: 1157 - DNA, 3483 bp, Homo sapiens
taacgggcagtagagtgtccggcttcggtgccgagtgccaccgcgagtgggccgagacgcggagggaggcgcggccggagctcgggtcgccgacgctggccaggaccgcgcttcttcccggcggcaggcggcgcggtccccgtgactctcagaagccgcccgatgtagagccgcttctttgtctcatacccctgaccattcgtgcgtggcacggagccgggtatctgcgggtacagcgatgaacagggcagacgtggccaggtgagcggcgctgctgaagcctggtttaacacgaaaggccacactaccatcacccctttctccaaccctgaaaaacagttcctgagacctgaactattgaccatcattttaatcggaccaactgcagctgtaacaagcttctctttggggtcacaatgaccactgcaggcaggggaaatttaggcctcatccccaggagcactgctttccagaagcaagaggggcgcctgactgtgaagcaggagccagcaaaccagacctgggggcagggcagcagtctccagaagaactatcctcctgtctgcgaaatcttccggctacacttcaggcaattgtgttaccacgagatgtctgggccgcaggaagcattgagccggcttcgggagctctgccgctggtggctcatgccagaggtgcacaccaaggagcagatcctggagctgctggtgcttgagcagttcctgagcatcctccctggggagctccggacctgggtgcagctgcatcaccctgagagtggtgaggaggctgtggctgtggtggaggatttccagagacacctcagtggatcagaggaggtttcagccccagcacagaaacaggaaatgcattttgaggagacaacagctctgggtacaacaaaggaatctcctcctacctcacccctcagtgggggctcagcccctggagcccacctggagcctccttatgacccagggacacaccacctccccagtggggacttcgctcaatgtacttctccagttcctacccttcctcaagtggggaactcaggagaccaagcaggggcaactgtacttcggatggtcaggccccaggatactgtggcatatgaggacctatctgtagactacactcagaagaaatggaaaagtctcacactcagtcagagagccctgcagtggaacatgatgccagaaaatcaccatagcatggcctccttggcaggtgagaacatgatgaagggttcagagttgactccaaagcaggaattttttaaaggatcagagtcatctaacaggacatcagggggactctttggggtggttcctggggcagcagagactggagatgtttgtgaagatactttcaaggagttagaaggacaaacctcagatgaagaagggagcagactagaaaatgatttcttggaaataacagatgaagataagaaaaaatccacaaaagacagatatgacaaatataaggaagttggggaacatccacctctgtcttccagtcctgttgaacatgaaggagttttaaagggacagaaatcctatcgatgtgatgaatgtggcaaagctttcaatcggagttctcaccttattggccatcagagaatccacactggagagaaaccctatgagtgtaatgagtgtgggaagaccttcaggcaaacctcccagctcattgttcatctcagaacccacacaggggaaaaaccctatgaatgcagtgagtgtggaaaggcctataggcacagctcccatctcattcaacaccagagactccataatggggagaaaccctataaatgtaatgaatgtgcaaaagcctttactcagagttcccgactcactgaccaccagagaacccatactggggagaaaccttatgaatgcaatgagtgtggagaggcattcattcgaagcaaaagtcttgctcgacatcaggtcctgcacactggtaagaaaccttacaaatgcaatgagtgtgggagagcattctgttccaatagaaatctcattgaccatcagagaatccacactggggagaagccttatgagtgtagtgaatgtggcaaagccttcagtcggagtaaatgtcttattcgacatcagagcctccatactggggaaaagccatacaaatgtagtgaatgtgggaaagccttcaatcagaactctcaactcattgagcatgagcgaattcatactggagaaaaaccttttgaatgtagcgagtgtggtaaggcatttggtctgagtaaatgtcttattcggcaccagagacttcacacgggtgaaaagccctataaatgcaatgagtgtggaaaatccttcaatcaaaactcacaccttattatacaccagagaattcacactggtgagaaaccctatgaatgtaatgagtgtgggaaggtattcagttatagctccagccttatggtacatcagagaacccatactggggaaaaaccctataaatgcaatgattgtgggaaagcttttagtgacagctcacagcttattgtacaccagagagtccacaccggagagaaaccttatgaatgtagtgaatgtgggaaagcctttagtcagcgttccacttttaatcaccaccagcgaactcacactggagagaagtcctcaggtctggcttggtcagtttcttaaggtatggttctctgagacagagagcaacgacctttgagttaagctgtctttataagcaggatgctcatagtggtttcccggagccagtagtcacggtggaccattccctacttgcttttccttggatcactaaggtgggagagtaggagtaacttattccagttcttacccattattaggaaggtaaggactacacatgtcattgaattgtaggtttcctttttttttctttacttttaaattttaacttttaaaatctatttcatttcttagttatgcatctcataatcagactccatgctttttaaagacagagataatatcttctctattctattctacttcctccatttcaccatttatacaaagtcattcaaaaaggctgattcatgccttcctgcctcttggctatggccctccccatctactctttaaactttaatctataacttttcatcagttttgttccctatctagaaaacattttcttctgtttgctaatctttgtccctcacaatttttgaaatccatctcatcactgaaatactttcttcttcaagtacttttttatttttcttcaacttctcttgatttgacctcagtgctttgaattcactggtgctacaatatgtaactgtggttaattgccttgtaaattttgcgtgtctgtatacttttataccaacttattgtaggctctttgaggtcaggtatgtatttctttcccatatagatagtattttgtacataccagttgttaaataaataatttttaaaatctcaaaaaaaaaaaaaaaaaaaa

SEQ ID NO: 1158 - DNA, 3307 bp, Homo sapiens
cgcccttcccccaccaccagcggcgagtgggtgacagagcccccgtctccgcgcgtcttcgccgccctgcgccgtgacccgctgtggcactgggccacgagtggaggctgcgcccctccagttctgccttcatagttctctgcctttgcccaaaactgcagaaaatgaacaaatcccagggatcagtttcattcacggatgtgactgtggactttacccaggaggaatgggaacaactggacccctctcagaggatcctatacatggatgtgatgctggagaattatagcaacttactttcagtggaagtgtggaaggctgatgaccagatggagagagaccacagaaacccagacgagcaggcgaggcaatttttaattcttaagaaccaaaccccaattgaggaaagaggcgatctctttggaaaagcacttaatctgaacacagactttgtttctttaagacaagtaccttataaatatgacttatatgaaaaaactttgaaatataattcagacttgcttaatagtaatagaagctatgcaggaaagcagactgatgagtgtaatgaatttggaaaagcacttctctacctgaagcaagagaaaacccacagtggagtagaatattctgaatacaataaaagtggaaaagccctcagccataaagcagccatttttaaacatcagaaaataaaaaacttggttcaacctttcatttgtacttactgtgacaaggctttctcctttaagtcactcctcattagtcataagagaatacatactggagaaaagccatatgaatgcaatgtatgtaagaaaaccttctcccataaggccaacctcatcaaacatcagagaattcacactggggagaaacctttcgagtgtccggaatgtggaaaagctttcacccaccagtcaaacctcattgtacaccagagagcacatatggagaagaagccctatgagtgcagtgaatgtggaaagacatttgcccaaaagtttgaactcaccacacaccagagaattcatacaggagagcgaccctatgagtgtaacgaatgtgcaaaaaccttctttaagaagtcaaaccttatcatacatcagaagattcacacgggggagaaacgctatgagtgcagtgaatgtggaaaatcctttatccagaactcacagctcatcatacacatgagaactcatacaggagagaaaccctatgaatgtactgagtgcggcaaaactttcagccagaggtcaactcttagattacacttgcgaatccacacaggagagaaaccatatgagtgttccgaatgtgggaaggcctttagcaggaagtcccgactcagtgtccatcagagagttcacatcggggagaaaccctgaaactccagccaggtcttactgtggaaaactcctgccagaactcttcaagcgggtgaaaaacctcatgacagtattgagggaacatgggaattcatactgagatgcaatctctcaactcaaaaatgtattaaaaataggatcccatgagaacattatactggaagttacatgtgatacccagctaaagaatacatatcagaatatatccagttgtaaatagccatacccagttgtactacaatgagctttttaaaatcttgaatgaattgagtattctagacagcagcataagaaatatacaaacagtatcctatgaatttagtggttttatgtggatatgccacaaaacacaagtggtatgctttagatctgcacatgtgaatttagcataatcactgggaatttgaaattcttgtcctctgtgataattaggacataacaagattttccatactaaacatcacatgtgtttttcagtatctctgcaatccagtatgcattccaaatgaaatgtgtaacatttaaagtagcatggaacctacgtctttccctactgcttgctggcatatatcagttggtatgaacattgttcttgagctgcctcttaggaaacagaagacagtgttgaagttttccctgcttctggtttgctgaagattttctagaagcactatttacacaaatatgcaaatgtgaaataaccgatctataacgtgaaggaggcagacatgagctgtactactcagtatgcaccacagaataagagtttgccgtgtaaagacaatatccccattcgtcatgctcttattttcccgtgggatatttgcatacaaatgcatgtctgttaccaaaatattgtgtaacacagacagaaaccacctgtttttgtctttccttgtttcccttaatatttcatgaattgtctagcaaaaatggtaggatgcttctgtagttcacaaatgttacatttcagagactttagaggaaaaattattttaaataactgtcaactgtttcattgctttttaaatttttcacgtgcataaccccctttagaagtaaatttttacactattttgttgtttaaaggaggcatttctacttccttgagttttgctgttgccaacctaaaacatttccctttggaacatgagttataagttattacttttcctttacatgtttacacttttataaaaatcagatttttcagtggtctctccagatattaacaagaattgttgtgtaactcaaagatttgcttttatagacttgatttcaaattcttaagttcagcctttccctatcaatcacaaatcatgtattggaaattataaatggcaaccaaaaactggcttttaaaaaatatttttggatatcattgatgtgctgtcacactatatattgagtgactttctgaacaaatttatccagaacatccatagcccaataagcttttgtctaagttgtcatcttacttactcacaaaggaggggaaaacgttattttcatagctgcttttagaaatgtaaattgtaacagcctccttggacaacattgtgagtctgttttaacattaatatactcttacaacctaggaatctcctgggaatctatccctaaggaataaaaagcgccagcacttaagattatatgtttactaatgtatattgtattttttggtaaggaccaaaaaaacaaacaaaaaaaagaccatcagtaagggaatggatgaataaattgtggtaaaaacataccatggctgaatggtatttccttgaaaagaatgtgtgggaacaaactccaaacttctctaggtcaaatgaggaaagcaagaggggagagagagagtgtatgtgtgtgtgtagcagtttttataaaataaagataaacccttataaaaaaaaaaaaaaaaaaaa

SEQ ID NO: 1159 - DNA, 2898 bp, Homo sapiens
gcctatagctgtgctgaatgcaaggagactttcagcgataacaatcgccttgtgcaacaccagaaaatgcacactgtcaaaaccccatatgaatgtcaggagtgcggagaacgcttcatttgcggctcaaccctgaagtgccacgagagtgttcacgccagagaaaaacaaggattttttgtgagtgggaagatcttggatcagaacccagaacagaaagagaagtgctttaagtgtaacaaatgtgagaaaacctttagctgcagcaaatacctaactcagcacgagaggattcacaccaggggagtgaagccctttgaatgtgaccagtgtgggaaagcctttggccaaagtactcggctcattcaccatcaaagaatccactctagagtgaggctgtataaatggggtgagcaagggaaagccatcagcagtgcctcccttatcaaacttcagtccttccacacaaaggagcacccttttaaatgtaacgaatgcggaaagaccttcagccacagtgcacacctctcaaaacatcagttaattcacgctggagagaatccctttaaatgtagtaagtgtgacagagtcttcacccagagaaactaccttgttcagcatgagcgaactcatgccagaaagaagccgttggtgtgtaacgaatgcgggaaaacgttccgtcagagctcatgcctttctaagcatcagagaattcactcaggtgagaagccctatgtatgtgattactgcgggaaggccttcggcctgagtgctgagcttgtccgccaccagagaattcacactggagaaaagccttatgtttgtcaggaatgcgggaaagccttcacccagagctcatgcctttctattcaccggagagttcacactggggagaagccctacagatgtggtgaatgtgggaaagcctttgcccagaaagcaaatctaacacagcaccagagaattcacacaggggagaagccttactcctgtaatgtgtgtggcaaagcttttgtcctcagtgcccatctcaaccagcacctgagagttcacacccaggagacactttatcagtgtcaacgttgccagaaagcctttcggtgccactcgagcctcagccgccatcagcgtgtacacaacaagcagcaatactgcctgtagccattgggtggcagcagagtcccagaatatgagaccgttactcggatgttgaaagttggaaactatcccattgcaagtttctctccaaataaatgcatctaaagattgattagaaagtttgtgcgcatgtttttcattataacaatgaaaacacaaaagtggagaagctgtacaacgtcaggattcagaggtaggctctggagccagtctaccttgagttaaatcccacctctgccatctactacctaagtgaccttgggaaggtcagaaaaatctctcagggcctcggtgtccttatctgtaaaatgggcatcacctacctcagagggcttttctgaggattaaataaataaatgtgaagcacttagaactgatggccagcacatgagggctcaccaagtgtaagccacaaatacacatcagctatagcacaaatatacttgtgttacaagaaaggaattagtaatctgtgtttactgtagttaatgttcttacaatgtatcgcttttaatttaagttttccttttttacagtttttctccagcactttactcttcttaagtgcctggcctttttttgtccctttatctctcctggtttttttcttaagccccagaaagccaaaaagaacatgtaaactcttcacctcaactagctacaaccttccactcctaacctcccaagcttctcacttaaagaggactccctatcccacaaacacatgctccctcttcctatgaccttcctccatttaacagtgttggttatgcaataagacacccaatttttcatgggagttgacaccaaaacacagctggattccatcaggaaagctgcattgatcagggtgttaaccgcatatgaaacaacccatatggaagacatacttaggggtcaaacctgtggtgtgtggaagtgaccactgggatgtcatcattcaccatttatccaggatggccgctcaccaggcaatttgctaggctcgggggcgggtagtatccatacactatgcactactgctctgaagcttctggaatcagaaatgaacccattttcatcgacgattgctgttagttgacaagtgacatcttgaaaatgccacattccctcatgtcacaggaagttctgggatcaccaaggattgttggagagtccagtgagatggaaccacacaaccagttccctaccagtgtcttgtcagctctgggtgtttgttccctgccactaagtggctcagtcacacctttgctgaaacacagtagtcttatgaaaagcactggacacatactttgaatacctttcatattttaggtgctgaaaatggtgagggagtgagtgctctgcacccttgggcttttcaactcttgcacctggagttctgctggttaagtttgttaaacttagttgaaactgggaacctgttggctaaccattggggccttacactgtttttcaaatggttgcaacatttaacttctcgcacatggttcccgtcctctggagctctgtcttgtcggggagatgggcatgttgtataccaaaagagtgtacaaagtgttgcagggctgtgacacaatagggactctatggaaaactggcagccattgggtgtgggggcagtctgtaaatcagtcacctgtgttgctgcaggccaaggtagaaacgccctccgtgtgtgcatatttgttggttctctgattaaagttttgagtctaaaaaaaaaaaaaaaaaaaaaaa

SEQ ID NO: 1160 - DNA, 3007 bp, Homo sapiens
cacacgcacacacacacacacaaacacacgcgcacgcaaacagcagtgaggaagagaaaagcagagataagcaaggctccgcagcagcctcctttctaacttgaccctcgccagaccctggccagcatggttgtcctgaatccaatgactttgggaatttatcttcagcttttcttcctctctatcgtgtctcagccgactttcatcaacagcgttcttccaatctcagcagcccttcccagcctggatcagaagaagcgtggtggccacaaagcatgctgcctgctgacgcctcctccaccaccactgttcccaccaccattcttcagaggtggccgaagtccgcttctctccccagacatgaagaatctcatgctggaactggagacctcgcagtccccgtgcatgcaaggctcgctaggctcccctgggcctcccggcccccagggtccaccggggcttcctggcaagacaggaccaaagggagaaaagggggagcttggccgaccaggaaggaagggtagacctggccccccaggtgttcctggcatgcctgggcccatcggttggccaggccctgaaggacccaggggtgaaaaaggtgacctgggtatgatgggcttgccagggtcaagaggaccaatgggctccaagggctaccctggatccagaggggaaaagggatccagaggtgaaaagggtgacctgggtcccaaaggagaaaagggtttcccaggatttcctggaatgttggggcagaaaggtgaaatgggtccaaaaggtgaacctgggatagcaggacaccgaggacccacaggaagaccaggaaaacgaggcaagcagggacagaaaggggatagtggagttatgggcccaccaggcaagcctgggccttctggtcaacctggccgtccggggcccccaggccccccacctgcaggacaacttataatgggacccaaaggggaaagaggatttcccgggcctccaggaagatgtctttgtggacccactatgaatgtgaataacccttcctacggggaatctgtgtatgggcccagttccccgcgagttcctgtgatttttgtggtcaacaaccaggaggagcttgagaggctgaacacccaaaacgccattgccttccgcagagaccagagatctctgtacttcaaggacagccttggctggctccccatccagctgacccctttctaccctgtggattacactgcagaccagcacggcacctgtggggatgggctcctgcagcctggggaggagtgtgacgacggtaacagcgatgtgggtgacgactgcatccgctgtcaccgtgcctactgtggagatggtcaccggcatgagggtgtggaggactgtgacggctctgactttggctacctgacatgcgagacctatctccctgggtcatatggagacctgcaatgcacccagtactgctacatcgactccacgccctgccgctacttcacctgagggccgtgaggagaaggtgggctgcgccccacagaactggcagcagcttctccactgtcatcaaactggccatgtcctggccccgtctccaccaacctttgtgtgacaaaaacaaggacaaattcctgctactaagacatgctgttaactcagtctgactggaagaatttaggaccactgcatcctgtcttaatccaaggtactggaaaaccttccacatgcccaacctgagacctgttccccatcgctaccatttggccaaacaaccggctacaatgctcttcctcttctggaatgttgctgacccaggccgtggacttggctgagcactgttagacacacacagacctgcaggctgttttagaatgttttgatctctttggggaatctggagtacaggcctctccgcccctgaccaccgaaacgtgcaggcattctcactcacactgggcagcccgctgtcgggtctctctaggcctatgaaccacaaagcagggaagtgggcacgttctctcggggtggctcacagctttgaacctgccaaaggacccctcgactggccacagcccagcccagcctgacgtggatgtggctgcccaggaaaagacttaactgtgaaaaagtactgagaacccacctgacccaggcttgccccaagcagaggctagagaagaggctcctcttctcagtgtttcccaaaggggcggctcttgtggtttcaaaatctctggcaccatcttgacctcttggctctctctgcactttgccccctgtctcaaaaatgtccctcatgtccatttcctgtccaggagactcatgaggactgtgtgacctgcacaagcccacacctgggcaggctgttggtgtctccttggtccttaggcagatactcccctgagtccccgatctagggccagctgcagagggctctctctaggcagagcgttcctggccagagctctacctctttgcctcctgctgacccctgacagcgtcccgtggcatttctttcatgtctgcatattgcatagccttgtcctcctgtgtgcctgagctcctcccttttcaataagattattagtcgtgcatgtctgtgagctgcctttcatcaccatttttcctgagtagggcttagttttattctggaaagacatctccaaggtgaggtccacccccacagcagacctcaagtagaaattgcccaatttttaccagctggagggacacccttgggtttttgtacgaagctatttaatgagcctgtgtcttggggactcagcaggctggagcttggggcctggtggaccatcacctggtgtctgtaggtggacccggtctcccacaggtgacatcaacctgagggtggcgtctttagagacaggcacatgggcagccctgttcccttcgcctctactgcgaggcctggggagatgttgttttcatgctgcttccaccatcacactggggtttctggatgggaaataaaaaaataaaggcagttcatttccccaaa

SEQ ID NO: 1161 - DNA, 10487 bp, Homo sapiens
acgcgggggagtgcagctggcaccatgggtgtgctccagagcaacttctgcttgctctgagccccctgccctgcctcccctttcaccatgtttcctctgacaagattttaagtacagcaattcaagaagatttctcctcctaaacgacatttatctgaagtctattgcctcttgattgctggaaaagaatcttaaaatcatttcaaaagtaacttataaacaaacttattaaaagtgatgaaaggagcattgaaattaattagcactaatttttcactgtgccaaagtgtgcagtgtccttcagaggaaacaataacagatctggtgagtgtgccatgccagtggggagaattgaatgtccctcatctccctctttccctagggacattagtcatgagtgccgagtgtgcggggtcacagaagtgggtctttctgcatatgcaaagcacatttctggccagttgcacaaagataacgttgatgcccaggaaagagaagatgatggaaaaggagaggaagaggaagaagattattttgacaaggaactcattcagttaataaaacaaaggaaagaacaaagtcgacaagatgaaccttccaatagcaaccaagaaataaactctgatgacagacgaccccaatggagacgagaagaccgaattccttaccaagacagagagagttacagtcagcctgcatggcatcatcgtggacctccacagcgggattggaaatgggaaaaagatggctttaataatactaggaaaaacagctttccacattctttgaggaatggtggtggaccaagaggacgttccgggtggcataagggtgttgcaggaggctcctcgacttggtttcacaaccatagtaattctggaggtggttggctttcaaatagtggagcagtagattggaatcataatggtacaggaaggaattccagttggctttctgaaggaacaggtggcttttccagttggcatatgaacaacagtaacggaaactggaaatccagtgtacgtagtacaaataattggaattacagtggccctggagacaaatttcaaccaggcagaaacagaaattctaactgtcaaatggaagacatgactatgctatggaacaagaaatctaataagtcaaacaaatacagtcacgacagatataattggcagcggcaagaaaatgacaaacttggtacagttgccacatatagaggtccttctgaaggatttacaagtgataaatttccttcagaaggcttactcgacttcaattttgagcagctggaaagccaaaccactaaacaagcagacactgctacttccaaagttagtggaaagaatggcagtgcggcaagggaaaagcctcgtcgctggacgccttacccttctcagaagactctggatttacagtcgggattgaaagacatcactggtaacaagtcagaaatgatagagaaacctctctttgattttagcttgataactacaggaatacaggagccccaaactgatgaaacacgtaattccccaacacagaaaacacaaaaagaaatacatactggatctcttaatcacaaggcctcttctgattccgctgcttccttcgaggtggtgagacagtgccccactgcagaaaaacctgaacaagagcatacaccaaataaaatgccatcattgaaatccccactccttccatgtccagccactaaatcattgtctcaaaagcaagatccaaagaatatctcaaaaaacaccaaaacaaattttttttcccctggagaacactcaaatccctcgaacaagcccactgtggaagataaccatggtccttacatatccaaactgcgtagttcatgtcctcatgttttaaaagggaataaaagtacatttggctctcaaaagcaatctggtgataatttaaatgatactttacgaaaggccaaagaggtgctacagtgtcatgagtcattgcaaaatccacttcttagcacttctaaaagtaccaggaactatgcaaaagcaagtagaaatgtagaagaatctgaaaaagggtctttgaaaattgagtttcaagtgcacgcactagaagatgaaagtgatggagagacatctgacacggaaaagcatggaacaaaaattggaaccctaggttctgcaactacagaattgttatctggcagcactcgaactgctgatgagaaagaggaggatgaccgcatcctgaagacttctagagagctatccacttccccatgtaatcccatagttcgccagaaagaatctgaattacaaatgacatctgcagccagtccacaccctggcttattgctagacttgaaaacctctctagaagatgcacaggttgatgactctattaaatctcatgtatcttatgaaacagaaggctttgagagtgctagcttggatgcagagcttcaaaaaagtgacatcagtcagccctcgggccctctcctgcctgaactaagtaagcttggctttcctgcctcacttcagagggatctaacccggcacattagtttgaagagcaaaactggagtacaccttcctgagccaaacctcaatagtgcccgccgcattcgcaatattagcggtcaccgaaagagtgagacagagaaggagtctgggctcaagccaaccctacggcagattctaaatgcatctcggagaaatgtcaactgggaacaggtcattcagcaagtaaccaagaaaaagcaagagctgggcaaaggcttacccaggtttggcatagaaatggtaccccttgttcaaaatgaacaagaagccttagatttggatggggaacctgatctgtccagtctagaaggattccagtgggaaggtgtttccatttcctcgtcccctggcttggcaagaaagcgaagcctttctgagagcagcgtgatcatggacagagctccttctgtgtatagcttcttcagtgaggaaggtacaggcaaagaaaatgagccccagcagatggtttcacctagtaactcattgagggctggacagagccagaaagcaaccatgcacctcaaacaagaagtgacacctcgggctgcctccctccgaacaggtgaaagggctgaaaatgttgctacccaaaggcgacatagtgcacaattatcctctgaccatataatacctttgatgcatttggcaaaagacttgaacagccaggagaggtctataccaccgtcagagaatcagaattcccaggagagtaatggagagggaaactgtctgtcatcaagcgcatcctcagcccttgcgatctccagtttagcggatgcagccacagatagtagctgtacctctggtgctgaacaaaatgatggccaaagtattagaaagaaacgaagagccactggagatggatcttctcctgaactcccaagtcttgagagaaaaaataaaagaaggaaaattaaaggaaaaaaagaacgttctcaggttgaccagctgctgaatatttctttaagggaggaagaacttagtaagtcattgcagtgcatggataacaatcttctgcaagcccgtgcagcccttcagacagcttatgtggaagttcagaggctacttatgctcaagcagcagataactatggagatgagtgcactgaggacccatagaatacagattctacagggattacaagaaacatatgaaccttctgagcacccagaccaggttccctgtagcctcacacgagaacgaaggaacagtagatctcaaacatccattgatgccgcactgctgcccactccctttttcccactttttctggagcctccatcttcccatgtgtctccatcacccaccggagcctctcttcaaataaccacgtctcctactttccaaacccatggcagtgtccctgctccagactcatcagttcagattaaacaagagcccatgtctcctgaacaagatgagaatgtgaatgctgtgccaccaagctctgcctgcaatgtgtccaaggaattactggaagctaatagagagatcagtgacagttgtccagtttatccagtcatcactgctagattgtccttaccagagtcaacagaaagtttccatgagcctagccaagaactgaagttttctgtggagcaaagaaataccagaaacagagaaaactctccctcttcccaatcagctggtctttctagcataaataaagaaggggaagagccaaccaaaggcaatagtgggtctgaagcctgtaccagttcttttctaagattgtcttttgcttcagaaacccctttggagaaggaaccccactctccagctgaccagcctgaacaacaggcagaatccactttgacatcagctgagactaggggaagcaagaaaaagaagaaactccggaagaagaaaagtctacgggctgcccatgttcctgagaatagtgacactgaacaggatgttttgactgttaaacctgtaaggaaagtaaaagctggaaagttaattaaaggggggaaagtaacaacctccacttgggaagacagcaggactggtcgggagcaggagagtgtcagagatgagccagatagtgactcgtctctggaagtcctagaaattcctaatcctcagttagaagtagtagccattgattcttcagaatcaggagaagagaaaccagacagcccatctaaaaaggatatttggaactctacagagcaaaacccactagaaacgtctcgttctgggtgtgatgaagttagctctaccagtgaaattggcactcgctataaagatggcatccctgtaagtgtggcagaaactcagactgtgatctcctccataaaaggatcaaagaattcttcagaaatatcttcagagccaggagatgatgatgaacccacagaaggaagctttgagggacaccaagctgccgtaaatgcaattcagatatttgggaacttgctatatacctgttcagcagataaaactgttcgggtttataatctggtgagtcggaaatgtattggtgtctttgagggtcatacctccaaagttaactgcctcctggttactcagacctccgggaagaatgctgccctttacaccgggtccagtgaccataccatccgctgctataatgttaagagccgagagtgtgtggagcagttacagctggaagaccgggtcctctgcctccacagtagatggcgaatcctctatgcgggactggcaaatggcactgtggtcaccttcaacataaagaacaacaaacgacttgagatctttgaatgccatggccctcgggcagtcagctgtcttgctacagctcaggaaggtgcccgaaaactgctggtcgtggggtcttatgactgcacaattagtgtacgcgatgcccggaatggactgctcctcagaactctggagggccatagcaaaaccattctttgcatgaaggtggtgaatgatctcgtgttcagtggctccagtgatcagtcagtccatgctcacaacattcacactggtgagctcgtgcggatctataaaggtcacaatcatgcagtgactgtggtgaatatcctaggaaaagtgatggtgactgcttgcctggataaatttgttcgtgtctatgaattacagtctcatgatcgattacaagtttatggaggacacaaagacatgattatgtgtatgaccatccataaaagcatgatttacactggctgttatgatggcagtattcaggccgtgaggcttaatctgatgcagaattaccgctgttggtggcatggttgctctctgatatttggcgttgtagatcatttaaaacaacacttgctgaccgaccacactaatcccaacttccagactctgaaatgtcgctggaagaactgcgatgcttttttcactgctaggaaaggatccaaacaggatgctgcaggacatattgaacgacatgctgaagatgacagcaaaattgattcatgaagttttttgcctcccacgttgggaagtcattagttgaactattttcacattggccccccacacaggccactctcttccctttcttggtgaagtaaggaaggagaaagtggttactagccaggcatacccctagcataagtctgggcagctctatgggatgataaattacacttttaagttcttgctggaggttttaaatagatttagacaaatgttaaggaaccatacttctctgggacagcatggcatatagtgatatatgctatttgcgttctccagatgtttattgaagatacagatcctaattggttacccagtttgaccctaatcatatgtatattttattgatttcagtttgcaatttttaatttatgttcttatgatggtttaaacctatagtcaggcttttaagtacaagtttgtttaagtgccagactttgaggatcagttttaatttctccatttgtaatagctgggtatttaaactggaagcaaatagttttctttcttaacaattatgtgcagtgtgtgtcactgttttcttgctttatagatagagctggctttaagtgctaaaggacacagtagatttttgacaaacagtggctgctctgctgactatcttttaggaattcaggaagcaaatcacatagtgacaagtccttacagacaccacttctagtaaatctctgtaaatgtggatagaaagctcagtgtgaggcagtgcgtagacctaacgtctacctttacatctgctgttgaacctgggcactacctgttacagatcctgtcaggctgttgaactggaggtgtacctttatcttcctttctagtgtctgaccctgcaagcctaatgttggtttgaacccttttggtttgttcagttgccagcctccatctctcccactgtatggccgtgcctagaccgatggcagccatcgaatattcctctgggctcacggggtgttttccacccccctgcagcaactaagatggtgggggagagggggttagaataaagcatctgaatacagttttcaggacctcaagcagacttcctagagacttgtttctgagacagttctttgccttcacttccctgctagctgggaaagaagagtggagcagagactctgcctggccactgagaacagccaaattcacaaaccctcagtggggctttgtttttggattttctccggactcatcagtaaacctgtagaagtgtcgctttccagccttttgtttctggatcctcaaaactcagaacgtggccgggcgtggtggctcacgcctgtaatcccagcactttgggaggctgaggcaggcagatcacctgaggctaggagttgcagaccagcctggccaacatggcaaaaccccgtctctactaaaaatacaaaaagccgggcgtggtgggcgcctgtaatcccagctgctcaggaggctgaggcaggagaatcgcttgaacccgggaggcagagattgcagtaagctgagatcgtgccactgcactccagcctggtgacagagtgagactccgtctcaaaaaaaaaaaaaaaaactcagcttcttcagagagataaaattgggggaggagcccagggccacataccaagctttgggacatggtgcctcatgctctctgggattgcagaccatccaggtctgtcttcgcccctgttagtgcacatatatccactcacatgtcttccctcaggctatcgggcagggggacttcaccagggggtttatggataggcttcaagagggtctgtgagcccccagaaattgtgtgtgagactgagtatgtgttcttttttccaggaaaggctccagtggttcttacttgatccaaaaaatgtcaagaattaatctaggaggccgggcctggtggctcacacctgtaatcccagctctttgggaggccgaggcgggtggatcactcaaggtcaggcatttgagaccagcctggccaacatagtgaaaccccgtctctattaaaaatacaaaaattagctgggtgtggtggtatgtgcctgtagtctcagctactcaggaggctgagacaggagaatcacttgaaccctggaggtagaagttgcagtgagccaagatcatactactgcactccagcctgggcgacaagagtgaaactccacctcaaaaaaaaaaaaaaaagagttaatctaggagataatgaatggcctagtactagataatatatggccccacaagctcttgacttctgtccttggggaaagccattttgttaaccacactagtgagatttacatgatgcttaatggagaacagagaagatcttgttgcaaaaggtgtattaaatatttgtgctgtttctgtatgagattgagaagcttttcccacctctcacccctatttcctataaggatatccagagaagccaaactgttctgtgggtttgggaatggtcatttcccgggaaaatgcatctggatcgatgactaaacctggcccttttctctgggctgtagtgaagccgcattttcacgctggctggcagtgtgctgagagcctcgaatgctctgcggcgtagtgcccttctgccctgcctgacgatgtatcgaaaagatgagagtgaaggagactttgtgcagcaggaaacgggtaggtgaggtgttgggcagttgtgggaacttctgagagtattacagagtggtagaatcggtaagaactctgatttggacttcgctttggtggaactgtgtgcctatacctgcctgtgtgtgtgcaagtgtgcaggttcctttgtatgtatgtgtacgtgtgggaacctgtgtttgtcatatttttcttcatttcacaaaggctttttttgaagcagtggcagtatgcctttgtttcaagaacacatgaaattcttttaacaccagattagtgtgttaccccaaatgaacggttctagccctctattaagaaataaagggaccataagcattttggctgcttatggctgtgtgttactacttacaagagtcttgaaaattatacagaactttgccttctttttttaatgtcttccacaatgttgtgactgattataaccctgtttcccctcagagaagagctatggctcagggatctgtgttgactctggcatttagtggctttgtgaaggaaagaaaccattaaatgacctgacaaaaactgactcatgtctttaaagtagttgaagccacttttagaatgttactctcggttgcttttgtctaattctaatggcttaaagccaagaaaaccatagtataaatctttttgtgtacctatgctagtgtttaaatggcagttcgttgtgataaagtatcagtcacttcaagttttctgtgaaagtttttaattaggttaaaaataattttggcatacgtctctactcagtttataaagcagttccacaccatgcaaacaaaactctaacagcaaaggttatcttgacctgatgttacttgaatctgagagaaagtcattacttactactgcactcctgcttttgtgggaaaaattttcttcttccccagaagagttaacagttgagtgttcagctcctgacttacctttaatttagaggcaatattattactgtttaagtgattatttgcttaacacaggttttattttgtctttttgctggtagattatacaagggacaactttagtgatgaggcatgtggatgatttggtgggagtaggtatatacttagtggaatggtttattttatggaagagaattcattggaggtgagattgaagtatattgtgaagtgggatttgaacagcacatatgctctggtttgctcaaataactgcagtttatgcttacatctaaattttgtttctgttacctaaacgggagcttctagaattacgaaggccatacctgccacatttataaaataatggttttatccctgcccccaaatcatcaggttcctcgggtttaagagaagtggtctaatagacaggaatagaagttgtggtggaggtgatttgggatagactaggtttccttatgcaagtggatatgagctcctcatagaaaccagacctactgtattagacagtaacctctaacctcacctccaagcccaagtatatggccctgctgggttacctggtgactacatttcccagattcactctaaattcaaggtagtgacccaaataaattgggaaaggagggggtcaaggaggaaaagctgttgaaaatctttctcctatttaagagaaatatatgccctagagctgctccagcacccttggtttctgatttttttaatattgaatatggattagaagaatgaaatcagatgacacctgactgcaaaaatgtttataagcaaatagccttcttacattttggtataaagctgtgaacttcgtaactttgtaaagcaagatataaagcaaatacaagaggaaaataaagtacttttactaattgaaaaaaaaaaaaaaaaaaaa

SEQ ID NO: 1162 - DNA, 3510 bp, Homo sapiens
gtgttcacggccggctagacattctgtgctcgtgcaggaggagggctgctaccatcagggacgtgcacgatttcccccaccccgccccctccccaaactccaaaaaaaaatccaaaacacactgccacccaccgtgcccccgcgccccgagcccctccggtcccggcctgcgtttgctagcgagcgcggggaacccacggcagtgtctgtgcctgtgccaggctgcaggtctggcgtgctcctgatcagagttactctgatctgaagattttggcgttcaaggcattaagataatagcctgagttgttcatggagtttttcatcagtatgtctgaaaccattaaatataatgacgatgatcataaaactctgtttctgaaaacactaaatgaacaacgcctggaaggagaattttgtgatattgctattgtggttgaggatgtgaaattcagagcacacagatgtgttcttgctgcctgcagcacttactttaaaaagcttttcaagaagcttgaggttgatagttcttcggtcatagaaatagattttcttcgttctgatatatttgaagaggtcctgaactacatgtacacagcaaagatttccgtgaaaaaagaagatgttaacttaatgatgtcatcgggtcagattcttggtatccgatttttggataaactgtgttctcagaagcgtgatgtgtccagtcccgatgaaaacaatggtcagtccaaaagtaagtattgccttaaaataaatcgccccattggagatgctgctgacacccaggatgatgatgtagaggaaatcggggatcaggatgacagtccttctgatgacacagtagaaggcacacccccgagtcaggaggacggcaagtcgcccaccacaacgctcagggttcaggaagcgatcctgaaagagctggggagtgaggaagttcggaaggtcaattgctacggccaggaagtagaatccatggagaccccagaatcaaaagacttggggtcccagacccctcaagccttaacatttaatgatgggatgagtgaagtgaaagatgaacagacaccaggctggacaacagccgccagtgacatgaagtttgagtatttgctttatggtcaccatcgggagcagattgcctgccaggcgtgtgggaagacgttttctgatgaaggcagattgaggaagcatgagaaactccacacggcggacaggccatttgtttgtgaaatgtgcacaaaaggtttcaccacacaggcccacctgaaagaacacctaaaaatccacacaggatataagccctatagctgtgaggtgtgtggaaaatcatttatccgtgccccagacttaaagaagcatgagagagttcacagtaatgaaagaccgtttgcgtgccacatgtgtgacaaagccttcaaacacaagtctcacctcaaggatcatgaaagaagacacagaggggaaaagccttttgtgtgtggctcctgcaccaaggcatttgccaaggcatctgatctgaaaaggcacgagaacaatatgcacagtgaaaggaagcaggttacccccagtgccatccagagcgagacagaacagttgcaggcggcagcgatggctgcggaagcagaacagcagctggagacgatagcctgtagctagaggcggtgggacagggacactttgcctggaaagtggagactgagatgacgtggatcataatgagtgaatgccagttacaatatttttgtggaaacgtatggaacattgtactcactggacttaaggcagtgcttggttagctatttttaagacttttcaaggaaatggtgttcctcagttctgaccaaaccgtttcactgtcttgtctggtgtctagtattaatgttgcccagtaagcacctctctcccttttttttttttattattttaatttgagaactcctgtgtccagtttagaagtgagagacttccatttttagttcctttacactcaccaccctagcaagtgccctgcacagagtaataagtaaattgatttcctaatcacaattctatgtgacttatggtcaaaagagcagttttaataactttaaaagtacttcagatagacgcagaaaattggtgagtggttgaccaagaacactgcacaaatataaaaaaagttctggaaatgcagaatggcgttagatttatatttggtttgttaattttatatcactgtttttcactgtttttgtggacaaataatggttgctttgctgaagtgttcttcctcaatcttgattgccctgtacctacccaaaagctgtagtcacacatcctaaaggccaagcaaacccaccgggatggtggggggtcttggagccaagctcttaggttcctcttatttggggcagtaccagtccataccagctgcgatttgtgagtggacctgtggtaagaagaatagaaaaggctctcagagataaggttttttacatgtgtaacaatcccaagatttcctagattaaaatcttaattgattttgaaattggatttttatttagaatcaaaattaggacaagaacagataacttcttcagatacatttgtgtaactttacagaatgtcatcaagctttggggctctgtggggcacatgatttatccataaaggagatgcagtatgcttacttaaattaataaatttaaaatcttttaagtgtgtaaatagtagtgttggtcttacgtatttcaagtaaaaagtagacagctgcactttttttgcacattggattaaaataacttccatcagcaacaaacatcagactgtttttaacaaatattaaagattgtcagaccaaatgtttatgttttcgaaatatatttcatcactggttacagttttaaatagaagttgattgccttttcatagccgtaaatgagaattataaactctattccagttttggtatactaaatgttcttttaaccatctttaggaatatattgaaatgccaacaatagtttgaattgtgttctgtaaaaaagtattagtcaattatttttcaaaatgtagaattgtagaaaatgtcaatttttcaaactcatttttcattgctaggatttcttttaaaaaaattaaagtaatttcacttcatagcttgttgcattaacacctgtaattctattgtgaaagaaatttgattttttaattggtgtgtgttatgcccaagatgttaggatgaagatgctacctttttaaaaattttagttattggtaaaatgtttaattttacttaaaattaatttcttttcttgaaagttgtttattctgttctaaaagtagtcctgtcactgtgtttttatgctacttatagaaggggaactgattgccgttcctaggctgttttaaccaaagcaaaggaaaaataattttaacatcttgtcaatagctacttcaacaaaccatattttgggacttcattttttgtatataaaagaaaatatacttctatcaaaaaaaaaaaaa

SEQ ID NO: 1163 - DNA, 4084 bp, Homo sapiens
gaggtgcgaccgggtcccggcctgagtcgcggccacccgcaggtctgagctgtgggctgaggcagcgcagccgctgccgcagggtgcgcgatgccttgaacctgggaaactatgtgaagcaacactctggattttgaaagacatcttttcatcatgggacagcaaatttcggatcagacacagttggttattaacaagttaccagaaaaagtagcaaaacatgttacgttggttcgagagagtggctccttaacttatgaagaatttcttgggagagtagctgagcttaatgatgtaacggctaaagtggcttctggccaggaaaaacatcttctctttgaggtacaacctgggtctgattcctctgctttttggaaagtggttgtacgggtggtctgtaccaagattaacaaaagcagtggcattgtggaggcatcacggatcatgaatttataccagtttattcaactttataaagatatcacaagtcaagcagcaggagtattggcacagagctccacctctgaagaacctgatgaaaactcatcctctgtaacatcttgtcaggctagtctttggatgggaagggtgaagcagctgaccgatgaggaggagtgttgtatctgtatggatgggcgggctgacctcatcctgccttgtgctcacagcttttgtcagaagtgtattgataaatggagtgatcgacacaggaattgccctatttgtcgcctacagatgactggagcaaatgaatcttgggtggtatcagatgcacccactgaagatgatatggctaactatattcttaacatggctgatgaggcaggccagccccacaggccatgaccttgaagtgaaagtcttctgttgctattgtgggctcaaatatttggtcatgggggaagaatgtagggttgtggcactggcacagacacaggaaaatccattttccccactcttttatttttgctattctgatcatttgtcccccttttaaaaataaacttcccatgtcttccatttgtggtactaaaatttgctactgttttagaccatattttcctattatttatctgttcaaatttgtattattacaactaatagctcttgaattctttgctaaaggtaacagcaacacttccagaggcttctaaaacactactgttttgcagggcaggagtattctggaatctttttacttagatataaaataaacctcgaatattaaaaagttgtagccatctgagagaggaaagtttaagtgactgaaaatgtagaatacttcaacgtgcatgttactacttaaaactagtctttctgctggaatctaaggagtatatatatatatgcccccttgtggttaattattgctcctttaataatttttacttgaaatgatccacaattatttcataactttagcagtgtgttttggaactactgtacttaaaggtttgtttgtttgtttttgccatactgtataatttgggtgaggtctacaaaattgggtgtgactttcctttgcaaatggatttctcctggggaattttcttggctgttctggaaatgctttcccacagctgggtaactgttctaaatggctttgataatgctcacacatcttggagtttcagaaggaaattattctgcatcacaaatactaaattttatatttctaaattactataggtcatttaatattggtttatggtgcttttatttccttaacttgaaaacatctttctgagatttcagagtcctcaaatttcttagattaagagacaagaggccagtgcagtggttcacacctgtaatcccagcactttgggaggccgaggtgggtggatcatttgaggttaggagtttgagaccagcctggccaacatggcgaaatcctctctctactaaaatacaaaaattagctgggcatggtggcaggtgcctgtaatctcagctactcgggaggctgaggcagaattgcttgaacccaggaggtggaggttgcagtgagccgagatcacaccactgcactccagcctgggagacagaacgagactcctaatcaaaaaaaaaacacaagaaaatagagtgaggcttttttaccgtatatacataaaatacttatgaaaattagaagataatttggcattcctactgtttcactgtacttccattgaaatactctttccattaaaatattctgaaacaatatagtaataatggaattgtgatcttcagttgcacctcaaccattttttttgcttatgaactaaaatttctaacattaacatttcggcatgtaataaaacaagggcctatctcctttaaaatttaacattccatgtaacttttctgacttatcattcataagttgcaaatattactattttcctaaaccagggtacacaatttaagttgccacttattgatgacagaatttctggatagtaggattttaataggcgagcaaataaaattcaaatcaatttcaaggaaaaacatctggccaggggtagcttgatttcgcccccaaaaatactgaagactaatccattgacattcataatgggacagctaagtaccaaatagctaactactccctatggaggtttatgcaagcagagtaccaggggttccatcatatcaacctggcaatgcacttggtggttgtgtgaccttgagaaagtctcttactcttgtttatgtgttcttactttagaaactgagactttatttgtggttttcacactatttcagcagcaaaaactttttcaaggaaaatcttacagaacctttaaacacgtgtgcatacacacataccctataccccactatataaaagtcatattattataaatttccttattatataaactttatatactataaatgtgattaagtcaatgaataaaaacattaatgcattggtgatatccagcatgtttgaatttggtgagtaacacacatatagtgggagtcgttttttttaaaaaaattttttaattaaattcaagtcaaatttgcagaaccctgtatctcctccatagattcttagtattccatggaacatattttgaaaaccttgggatagatgatccactgaaatcttttccagctctaagattttaaattgtccttttagattagacttgctgagtttaattcagattacctaattttaaaatgtttctgaaaagtgaacagagttaccttacagagttttggatctttccagggatagccaatgattttatcccccagaatccttcacctttcaaggagttatttaacaatgagcccagtgactcaatagggcccaaacctttttattttacaatatgagctccaagacacttactgatctactgtgaatataaaatgttattagccttatcaaataaataaatgagcacagctctttgttcgctctattgaactgggtgataattatttagatgtgaatgttaggtcagttctactgtaataactaatcgtaaaagttgtaaatttgtttaatggatgaaatgtacactttttgtattctgtacagctttgtcttttttaaatatgaagtacttaaatgtacttactatgataggaaatataatgtgtgccttctaggatttgtgaagtggtttcatgaactctaaggaatttgttttccctatcctaactcagtaacagagggtttactccgattatgtatagaaccttagtttgagaaaatgaattttactatgtactgaatttagaggttgagaataataggatctgtgttattcttagtacccactgataaattgtgcaataaataatctttcgcaagtgattttagctaattgaagagattattttcctatgtaatttcacattctaatatactaaatgtttatattccttagagaactattttatattgtgcgctgggggcttgtgatgtttgtgtgctgttttaaaattcatttcaaattggactcgatttccttatatctaatatatatctgggagaaaaggctgcttgaaaatatcttttgattcagtgatttttaacattgggaagttgagtttattaaaaggtagtctg

SEQ ID NO: 1164 - DNA, 4611 bp, Homo sapiens
gcacttccggcgacgggccccctccgcgcgtactgcgggccccacgggtgttagtggcgggggcggcagagtccgggtgggttgtcgcgacggagccgggcctcttcgccgtcttgagacggggctggcgagaagggcccctcacggagttgccatgggcgtctaaccgcggcagccaggcccctctctacgtgagaccccggcccccctcccctttctgcagcccgcccgccacctgcgcgccgcgtggcctccgccggcgcctgcccgccccgcgcctccgtctcccacggagcaggccgggctctcgccatgggtcactgtcgcctctgccacgggaagttttcctcgagaagcctgcgcagcatctccgagagggcgcctggagcgagcatggagaggccatccgcagaggagcgcgtgctcgtacgggacttccagcgcctgcttggtgtggctgtccgccaggaccccaccttgtctccgtttgtctgcaagagctgccacgcccagttctaccagtgccacagccttctcaagtccttcctgcagagggtcaacgcctccccggctggtcgccggaagccttgtgcaaaggtcggtgcccagcccccaacaggggcagaggagggagcgtgtctggtggatctgatcacatccagcccccagtgcctgcacggcttggtggggtgggtgcatggacatgcggccagctgcggggccctgccccaccttcagaggacactgtcctccgagtactgcggcgtcatccaggtcgtgtggggctgcgaccagggccacgactacaccatggataccagctccagctgcaaggccttcttgctggacagtgcgctggcagtcaagtggccatgggacaaagagacggcgccacggctgccccagcaccgagggtggaaccctggggatgcccctcagacctcccagggtagagggacagggaccccagttggggctgagaccaagaccctgcccagcacggatgtggcccagcctccttcggacagcgacgcggtggggcccaggtcgggcttcccacctcagccaagcctgcccctttgcagggccccagggcagttgggtgagaagcagcttccatcttcaacctcggatgatcgggtaaaagacgagttcagtgacctttctgagggagacgtcttgagtgaagatgaaaatgacaagaagcaaaatgcccagtcttcggacgagtcctttgagccttacccagaaaggaaagtctctggtaagaagagtgaaagcaaagaagccaagaagtctgaagaaccaagaattcggaagaagccgggacccaagcccggatggaagaagaagcttcgttgtgagagggaggagcttcccaccatctacaagtgtccttaccagggctgcacggccgtgtaccgaggcgctgacggcatgaagaagcacatcaaggagcaccacgaggaggtccgggagcggccctgcccccaccctggctgcaacaaggttttcatgatcgaccgctacctgcagcgccacgtgaagctcatccacacagaggtgcggaactatatctgtgacgaatgtggacaaaccttcaagcagcggaagcaccttctcgtccaccaaatgcgacattcgggagccaagcctttgcagtgtgaggtctgtgggttccagtgcaggcagcgggcatccctcaagtaccacatgaccaaacacaaggctgagactgagctggactttgcctgtgaccagtgtggccggcggtttgagaaggcccacaacctcaatgtacacatgtccatggtgcacccgctgacacagacccaggacaaggccctgcccctggaggcggaaccaccacctgggccaccgagcccctctgtgaccacagagggccaggcggtgaagcccgaacccacctgaggacggcagtgaggatgagcacctctagcagcctggactccgcagtggctgtgtcagcctcacccttcgtgtgcacccgcatgggagggtcggagggtgctgcccgcccttggtgctggaggcgggcttggtgtccggctcaagtagccttcctctgctctgggaccagtggtttattttcccgcaaacgctgagtgactcggggccggacagttcataaataattgattcctttccccactaaagcagtcgaggagatttgtaatccactttttagtgcaacaagagctccatgttatgcttgtaataaattatttacacgggagctgggctggtgtgcagtggcaggtcccgtcagaagagatgaggctcctgggacaggtcagcgtcaggggcagcctgctgtctgctctggagggcggcgctcacctctgggtcgcagtccccacgatcagccagcagctgtgagagaggagcaggtcctcagcccatgccgcccactaggcctcagaccacaggggaggggctctggcagaaatagtcgagttgtattgccagccaggcaggcacatggcccaggcagctgtcaattctcatgtcccccacatggcccaaggtgggcatcttgacgttacctctgccacgtgtgagaagctctttttcgggcaccgaggtattaactgcagcagaaaaagacgagcttttgttatcagttccacggggttgccctagagagaaaacaggcaaactcacaggttagaagacatacagaaacagggctggtgtgtcccccatagtctgcatgctgtgccggaacattctttggcagaaggagcctccggctggggggagctcccctggaggtgggactggcccttgcacctgcctgacccttgagctccaggctcctgccagctggaggtgaaactgtgcttgtatccccagccacgaagagctggaccagcttcaagtacatgtccacagcaacatgcaggaaggcctcttccctgatggccgcgtcttcatggaagtaggagagaagactagaggtaaagacatagtgacaaatggctacagactgctggaaaggtagcaggtgatgccaagggatactgctcatctgtggagcagaggcacagacaacccttcccatctggcgggacccagaggtgctgagatgggggtctgggaaacactgcccagccctgaccagccctgtgggtggaggtacctgtaaaaagcgaaaggcagcagcctggtgtgctgatccggggccacacggaggaggagccgccccagcctgaggtctgcaacaccaagaagtggctcaggcaactctggacatctctgcctattatcagtgctggggacacccctgggggtcgggacgtgtaccctgggaggcctggctgtggggatagtgtggggcgaacagcctgagctgaggatacccaggtacctgtcagcagctgggagaggatgggggggtcgacctcttgcaggagggtgggtgtggtgcagagagaggcagtccccatgataggcccattggtcctggggttgaccagtgagccagtaaattatcttattgctttaaacaagtttgtgcttaatctgtcccaactaaaatggagcttataaacttacttagcaaggaacctcaaggagggctcgttcttaaccatttgcaagatgcctctgaaaagagcggccctccgcatttgtgcctcagcagcgtgtttcttaccactctctgtcaactgaaagagtgccagccaggatatcttcctcttctctaaacactcgaggattgctgcacaaacgtggaaagcctttggcaggtctgtggtgctctgtaaaccgcaggagaccaaccctgagaatggccgacctggtgctcccatgggtaggagggtacagccctcagcacagaagagggcatttcctctttgcttattgtaagtcttaaaactggtgacagttttacctatagaaggtaatactgggcctctggacagaagaggctcaggtaggaggccagggacttcgagcacccacaccaaggctgctgcaccacgtcctcaaataagacattaaaagaaaggcccacaggccggatgcagtggctcatgcctgtaatcccaacactttgggaggccgaggtcggcggatcactgaggccagttcaagaccagcctggcaatatggtgaaaccccgtctctactaaaaatacaaaaattagccgggtgtgacagactcacgcctgtaatcccagctactcgggaggctgatgcaggagaattgcttgaacccaggaggctgaggttgcagtgagctgagatcacaccactgcactccagcctgggtgacagagtgagacccccatctcaaaaaaaaaaaaaaaaaacccacggcctgggagttctcactcacacttccgcaaacacaaggagctcctgagctagtctggaaaccctgacttggaagctggctgcctggtgcccctgcctggcccacagtgggagaggacaccttggctggtaaggtctgacttacatttgaggtcagatgtgacgacagcaggcccatcaaggagaagaagaaaaggaaaaccaatagctgtaaataaaaacgtgcacttattattacattaaaattacctgtgctgtcattctaaa

SEQ ID NO: 1165 - DNA, 4076 bp, Homo sapiens
cgggcgggtgtggccaggggtgtgggtctgtgagggaccggtcggaagggcgtcgcgcggcctcgggtgacatgcggggggcggcgagcgcgagtgtccgcgagccgacgccgctcccgggtagaggcgccccccgcacaaagccccgggcgggccgaggcccgactgtagggactccagccaccttggccctccctgcccggggaaggccgcgctcaaggaatggcctcgcatccaaaggccagcgaggagcggcccctacggggcctgggcacagagctctgccttccagggacactgctcttccccaggagagaaacaagaagctggaggctgtggggacaggaattgaacctaaagccatgtcccagggcttggtgacatttggggatgtggctgtagatttctcccaagaggagtgggagtggctgaaccccattcagaggaacttgtacaggaaggtgatgttggagaactacaggaacctggcatcgctgggactttgtgtttctaagcccgatgtgatctcctcgttggaacaaggaaaagagccttggacagtgaagcgaaagatgacaagagcctggtgcccagacttgaaggctgtgtggaagatcaaggagttacctctcaagaaggacttctgcgaaggaaagctatcccaggcagtgataacagagagactcacaagctataatctggagtactctctgttaggggaacactgggattatgatgctctgtttgagacacagccgggcttggtgactatcaaaaacctggctgttgacttccgccagcagctacacccagctcagaagaatttctgtaagaatgggatatgggagaacaacagtgacctgggatcagcaggacattgtgtggctaagccagatttagtctctttactagagcaagagaaggagccctggatggtgaagcgagagctgacaggaagcctgttctcaggccagcgatctgtacatgagacccaggaattatttccaaagcaagattcatatgctgaaggggtaacagacagaacctcaaacactaaacttgattgttccagtttcagagaaaattgggattctgactatgtgttcggaaggaagcttgcagtaggtcaagagacacaattcaggcaagagccaattactcataacaaaaccctctctaaggaaagagaacgtacatataacaaatctggaagatggtcctatttggacgattcagaagagaaagttcataatcgtgattcaattaaaaattttcaaaaaagttcagtggtaataaaacaaacaggcatctatgcaggaaaaaagcttttcaagtgtaatgaatgtaagaaaacttttacccagagctcatctcttactgttcatcagagaattcacactggagagaaaccttataaatgtaatgaatgtgggaaggcctttagtgacggctcatcctttgcccgacaccagagatgtcacactggcaagaagccctatgagtgcattgagtgtgggaaagctttcatacagaacacatcccttatccgtcactggagatactatcatactggggagaaaccctttgattgcatcgattgtgggaaagccttcagtgaccacatagggcttaatcaacacaggagaattcatactggagagaaaccttacaaatgtgatgtatgtcacaaatccttcaggtatggttcctcccttactgtacatcaaaggattcataccggagaaaaaccatatgaatgtgatgtttgcagaaaagccttcagccatcatgcatcactcactcaacatcaaagagtacattctggagaaaagccttttaagtgtaaagagtgcggaaaagcttttaggcagaatatacaccttgccagtcatttaaggattcatactggggagaagccttttgaatgtgcggagtgtggaaaatccttcagcatcagttctcagcttgccactcatcagagaatccatactggagagaagccctatgaatgtaaggtttgtagtaaagcgttcacccagaaggctcaccttgcacagcatcagaaaacccatacaggagagaaaccatatgagtgcaaggaatgcggtaaagccttcagccagaccacacacctcattcaacatcagagagttcacactggtgagaaaccctataaatgtatggaatgtgggaaggcctttggtgataactcatcctgtactcaacatcaaagactgcacactggccaaagaccttatgaatgtattgagtgtggaaaggcattcaagacaaaatcctcccttatttgtcatcgcagaagtcatactggagaaaaaccttatgaatgcagtgtgtgtggcaaagcctttagtcatcgtcaatcccttagtgtacatcagagaatccattctggaaagaaaccatatgaatgtaaggaatgtaggaaaaccttcatccaaattggacaccttaatcaacataagagagttcatactggagagagatcttataactataagaaaagcagaaaagtcttcaggcaaactgctcacttagctcatcatcagcgaattcatactggagagtcgtcaacatgcccctctttaccttccacgtcaaatcctgtggatctgtttcccaaatttctctggaatccatcctccctcccatcaccatagcctcgagacgtcatttctgtttgactactccagcagtttaaaaccccatctccctgcccttttgttttctttttgtcccttattagttagttcttcacataagtgtaaatgtaacttattcactcctcttgtaaaacttatagtttctttaaattggttaatgtgtgagatgtgctcagcacagtgcctggtccatagtaagtgctcagtaaacttagctgttttaaaaactttgtatttgaacattgaaaagttacagtagtcagctctgataaaaaaatgatgcagtagggtgagggtaggaaaaagcacattttctatcaggaacagaattctccagtagtgggtgaggttttgcctttgttggttttaaaacttgattctataatgccaagttagttttgtggctttccatctgaccctatgtgaatgtaaggtgatgtgaccttgttggtgagaaaattaaactttacatttgacttgatttgttttagaaagtctagggaccatgaatgaataggccagctgggacaaatgaatttaaaaaatcagaaaaatgcaagatttatatgcatgaagttaaaacaactgacgttactcaagaattagaaaactttgcaagatttgacttgtttaaaaatcacatttataagtgaaccgtattaaaacttttaaggaaccattcattgtgaggtaaactgatccagaataggggtcagcaaactatgactcatggccacagtctcactgactgtttttgtatggtccatgatctagaatttaaaaaaattttaaagggttgaaaaaagtgaaaagaatattttcaacatgaaaattatatgaaatttaagttttggtgtctgtaaataaagttttgttggcttcagccacacagtgatttacaccttgattgtgctgcttccaggctgtagcagcagagttgagcagttgtgacaggagaccatgtggcctgcagagcccaaatatctactgtctgatcctacacagaaaatgtgtgtgatccctgctatggagcagaggttatcaaactaaagcccatggaccaaatcctatctgctgcttgtttttgtaaatagagttttatcaaaccacagccatgcttacttgtttagctattgactatggctgctttagacaactgtgacagactatatggctcgcaaaactgcaaatatttcctatcctttaacagaaagtttgccaacctctgctctagagtagagaaaaatgtataaaagattttaattttatgagggcaatacaactgtcacatcagaaacaagaaaacaaatgataaaggaactcatttatcaatagaggtgaaaggaaattattaaactatattgaaaaataaagatgtcaataaaaggagaaatg

SEQ ID NO: 1166 - DNA, 2803 bp, Homo sapiens
tgggaaggagagaaaatggcggcggagccgaacaagaccgaaatccagactctttttaagaggcttcgcgcagttccaaccaacaaggcctgtttcgactgcggcgccaagaatccgagttgggccagcatcacgtacggtgttttcttgtgcattgactgttccggggtgcaccgctccctgggcgtccatctgagcttcatcaggtccacagagttggattccaactggaactggttccagctgaggtgtatgcaggtcggcgggaatgccaatgcgacggctttttttcgccaacatggatgcacagccaatgatgccaacaccaaatataatagccgagctgcccagatgtaccgggagaagatccggcagctggggagtgcggccctggctaggcatggcactgatctttggatagacaacatgagtagtgccgttcctaatcactccccagagaagaaggactctgatttcttcacagaacacactcaaccccctgcctgggatgcgccagccactgagccttcagggacccagcagccagccccgtctacagagagcagtggcctggcacagccggagcatggccccaacacagacctgcttggcacctcacccaaagcctcactggaactgaaaagctccatcattggcaagaagaagccagcagcagctaagaaagggctgggtgccaagaaaggcctaggggcccagaaggtgagcagccagagcttcagtgagattgagcggcaggctcaggtggcagagaagctccgtgagcagcaggcagccgatgccaagaagcaggcggaggagtccatggtcgcctccatgcgtctggcctaccaggagctccagattgatcgtaagaaagaggaaaagaagctacagaatctggaagggaagaagcgagagcaggcagaaaggttgggcatgggcttggtatcccgaagctctgtctcccactccgtgctgtctgagatgcaggtgattgagcaggaaaccccagtgagtgcaaaatcctctcgctcgcagctggacttgtttgacgatgttggtactttcgcctctggacccccaaagtacaaggacaatcccttttccttaggggaaagctttggctcccgctgggatacagatgctgcctggggtatggacagggtagaggagaaggagccagaagtgaccatctcaagcatccggcctatttcagaaagagccacaaaccggagggaagtggagagccggagctcaggcctcgagtctagtgaggcgcgtcagaaattcgcaggagccaaagccatctcatctgacatgttctttgggcgggaggtggatgcggagtatgaggccaggtctcggctgcagcagctctcaggcagcagtgccatcagctcttcagacctctttggggacatggatggagctcacggagcaggaagtgtatctctggggaacgtgctgcctacagcggacattgcccagtttaagcagggtgtcaagtctgtggctgggaaaatggctgtgctggccaatggtgtgatgaattccttgcaggatcgctacggttcctactgatccgagctctgtgactcaggcttacgatggtgacggcaacaagaactccacagttcccaggctggggatgctttgccttgtggaagctggggaggatttgttacttcgtatgtgtggtgtgtgtgtggggtggcctttgaggcgctcactcctgtgaggggaatggtcagtaccagcccttgtcctctgcctgtggactgagccctttattccctctcacaccaccctccgtgtgttagactcttgtccttctgtcctgcccccacagctgctgctcacttatcctgccatactgggaaagggggttcccccacgatggcttattctgggtccagactttccccaggtagggaaagcggaaggtagaaggctttttttgctggctctagggttcttctagttcgaggccttgggtccccatcctctggaaccagggggaggcctggaaggagttcactgtagacccgtcccatggggaaagaggctgcggacttgctgctgctgctgctgccagtggcctcttctgggtgccaggagaggggaaggacctttgtctgggcgttaccaagggctggaaactttacctggtacctaaaggtttcatttgggatcagaccggagacccttgggttctcccgtctcaccacccctttctacagtaagcacttggaagattgtttcagggtgtctcagggtccctctgtaccatctgctgtggaatgcaggaccctctgtgacattctttatcccttcttccccgggttggtggccatggagggtcttgtctgctgtgattcgactctggatgctgtgagcttgatgctggccagggaagcagaggatgtgagaggcagaggcaggctcctggggctgagctccttcctctgcatcattctgggcttggcctggacagcacccgccagtgagagctgtgggcctcaccctctggcagctgagccaagcactgtcattcttggtgccatcttcccctgccgcaccggcagtctcagcccagcccccacctttgggttgtaggttgggctcccaagcaacacagaccactcttccccttgcccctcccccagagggacttgactttctttctggactgtttgtattgaaacaaagtggtgtcaaaataaagcccctgcagggcctggctccctgttggtctgagtgaaaaaaaaaaaaaaaaaaaaaaaaaaaaaaaaaaaaaaaaaaa

SEQ ID NO: 1167 - DNA, 1010 bp, Homo sapiens
ccattgttctcggtgccccacgggcttgagccggggtgaatctggaggggccgggccgagcccgggggcgctttcgcacgcgaagcaaccgctagagcaggacctggtctcccgagagcgggactacttgttgatatttgaggagggaagtgtcttacctgagagcctggctggagaagactgaggtccaaggcttgaagcctaagtgattgccccaggactgtggatgatggctgcagacatcccgagagtgaccactccgctgagctccttggtccaggtgcctcaagaggaagatagacaggaggaggaggtcaccaccatgatcctggaggatgactcctgggtgcaagaagctgtgctgcaggaggatggccctgagtctgagccctttccccagagtgctggcaagggcggcccccaggaggaggtgaccaggggaccacagggtgcactcggccgcctccgagagctctgccggcgctggctgagaccagaggtacacaccaaggagcagatgttaaccatgctgccaaaggaaattcaggcttggctgcaagagcatcggcctgaaagcagtgaggaggcagcggccctggtggaagacttgacccagacccttcaggacagtgctgtagctgtcgttgcttcccttccggtggaggtgaccagtttgtaatgaacttctggatctccagtcagatactatggaggagagagtgatggagggctgaggagaggcctcaggttgttatttggttggggaggcacagagcagaggttcaggtctcagcaggtgtcagaggtgattacagcccttcccatccaccttgcagcaggggctttgtgcctttcatctttaactgggcacctgagatgggaaccaatggggaccatcccagacacatgggtttgtctgtccctgacttctgcctctgagattgtctttgttggtctttgtttaataaacgccccgaccttcctcatgaaaaaaaaaaaaaaaaaaaaaa

SEQ ID NO: 1168 - DNA, 8021 bp, Homo sapiens
ctgcggcggcgcgctccgagcctgcgtctagggcgcccccgggtcagagctgtcgccgtggccgccgctgcaagaaccatgtaccgcagcagcgctcgctcctccgtctcttcccaccggcctaaagacgacggcgggggcggcccgcgcagcggccgcagctctggctcctcctcaggcccggctcgccgcagctcaccgccgcctccgccctccggctcctcgtcgcggaccccggctcgccgaccccgctcgccctcagggcaccgcggccgccgggcctcgccgtccccgccacggggtcgtcgcgtctccccgtccccgcctcgggcccgtcgcggctccccgtcgccaccgcggggccgacgactcttcccgccgggcccggccggcttcagaggcagcagccggggggagtcccgcgccgactatgcccgggacggccgcggagaccatccaggcgacagcggcagccggagacgctctcctggtctgtgttctgactctttggaaaagagcttaaggatcactgttggcaatgaccacttctgtgttagcacaccagaacggcgacggcttagtgatcggctggggtcaccagtggataatctggaagacatggacagggatgacctgactgatgattctgtcttcactcgaagctcccagtgctctcggggtcttgagcgatatatttcccaggaggaagggcctctcagtcccttcttgggacaacttgatgaggactaccgaacaaaagaaactttcctgcatcgatctgattatagtccccatatcagttgtcatgatgagctgttgcggggaacagaacggaatcgagaaaaactcaaaggctactccatacgatctgaagaaaggagccgggaggccaaaagaccccgttatgatgacacagtgaagataaacagcatgggaggggatcacccaagttttacatcaggaactcgcaactatcgacagcgtagaagaagcccaagtcctaggtttctcgaccctgagtttcgagaactggatcttgccagacgaaagcgagaggaagaggaggagcgaagtaggagcttgagtcaggagctggttggagttgatggtggtggtactggctgttccatccctggattgtcaggtgtcctaacagcatcggagccaggatattctttgcatcggcctgaggaagtatctgtgatgcccaagaaatccattttgaagaagcggattgaggtggacataatggagccctccatgcagcttgagagtttttccagcagtaccagctccagccaggatcaccctctctactctgggcacccatcccttccactaagtggtgctattgctgcttttgcctcagagattgaaaacaaggggactatggtagagactgccttgaaggaacctcagggcaacctctaccaatggggtccccttcctgggattcccaaagacaacagtcctctcagagaaaaatttggaagttttctatgccacaaggataatttggatttgaaggctgagggacctgagcgacacacagacttcctgctgccccatgagagagctagccaggatggcagtggtttttcccgcattctgagcatgttggctgattctaccagtacacaggaaaaaaggcgacgtagctttcccgacattgaagatgaggagaaatttctctatggggatgaagaagaggatttaaaggcagaatccgtaccaaagccccttgggagctctgagagtgaagttatgaggcagaaggcaagctccctgccgtcttcagctccagctgtaaagctagaatcactagaagagaccaatccagaatatgcgaagatccatgacttgctcaagacaatagggctggatattggagtagcagagattagtcaattggctgcacgcacccaggaacgacttcatggcaagaagccatcattacgctcctcagctgaccgccgttcctcagttgaccgatacttttcagctgaccactgttcctcagttgaccaccgcttctcagctgaccgctgttcctcagttgaccactgcttctcagctgatcgacgttcctcagatccccacagactagagagcagggaggcacatcatagcaatacccactctccagaggtgtcccatccacacccaccttctcctgtggatccttacctgctcacaaaaaacagccctccattcctaaagtctgaccatccagtgggtcatatttcaggaccagaggtggttggtagtgggtttcagtcatctgttgcagtcaggtgcatgttgccatcagccccatctgccccaattagacttccacacactgctgctttatctcagtttcacatgccaagggcctctcagtttgctgcagctcggatacctccgaactaccagggacctgccattccccctgcctcttttgatgcctataggcactacatggcatatgcagcctccagatggcccatgtatcccacctctcaaccgtcaaaccaccctgtacctgaaccacacaggataatgccaataaccaaacaagctactcgtagccgtcccaatcttcgtgtgatccccactgtgactcctgataagcctaagcagaaagagtctctgcgaggctcaattcctgcggcccaagtgcctgtccaggtgtccattccatcactcataagatataatccagagaagatctctgatgagaagaaccgtgcttcccagaagcaaaaggttattgaagagagggaaaaactaaagaatgaccgggaagcccgccagaagaagatgtactatcttaggaccgagttagagcggcttcataaacaacaaggagaaatgctgcgcaagaaacgaagggagaaggatggccacaaagatcctctcttggtggaggtgagtcggcttcaggataacattatgaaggacattgcagagctacggcaagaggcagaagaggcagaaaagaagcaatctgaactggacaaagtggctcagatcttgggaattaacatcttcgataaatcccagaagtctttaagtgacagtagagagcctacagagaagcctgggaaagcagaaaaatctaagagcccagaaaaagtgtcatcgttctcaaactcctcctccaacaaggaatcaaaagtaaacaatgagaagtttcgtactaagagccccaagcctgccgaaagcccccagtcagccactaagcagttggatcagcccactgctgcttatgagtattatgatgctggcaatcactggtgcaaagactgcaacaccatctgtgggaccatgtttgatttcttcactcatatgcacaataagaagcacacacagacactggatccctacaacagaccttgggcttcaaagacccagagtgaggccaagcaagatgccataaagcgcactgacaagataactgttcctgcaaaaggctctgagtttctggttcccatcagtggattttattgccagctctgtgaggaatttttgggggatccaatttctggggagcaacatgtgaagggtcaccaacacaatgagaaatacaagaaatatgtggatgaaaacccattatatgaggagcggcggaatctggaccgccaagctggcttggctgtggtcctagagacagaacggcgacggcagagtgagctaaagcgcaaacttagtgagaaaccaaaggaggagaagaaagaaaaaaaggcaaaggctgtgaaagaagtaaaggaggatgacaaggtctctgagaaattagaagaccaactctctgagggtaggaactcccctgaaaaagctgaaaataaaaggaacactggcatcaaactccagttaaaagaagaggtaaagaaggaatcaccaacatcatcttcttttgggaaattcagctggaagaagccagaaaaagaagaggagaaaagttcattggtgaccccaagtatctctaaagaagagattctagaaagtagtaaggacaaagaggatggcaaaactgaagctgggaaggcaaagcctatcaaaatcaagctctctgggaaaactgttgttgcacataccagcccttggatgcctgttgtgacaacttccacacagactaagatccgacccaacctgcctattccatccacagtactccgcaagtcatgttcagccacaatgagcaagccagctcctcttaacacctttctgtctattaagtcctctggaaccactgctaaacctctgccagtggttaaagagtcttcagctgatctcctcttacctccagacatcatctccaaagcatttggaggggaagaggtgattctaaaagggtctccagaggaaaaagtggtgttggctgaaaagagtgagccatctcatttacctgaacaaatactaccacctcctccaccacccccacctccaccacctccaccaccccccgttatacctcatccagctgccccgtctgctgctcaagcaaatgctatcttggctccagtaaaatcaaacccagttgtatctcagactctcagccctggcttcgtgggtcctaacattttgaacccagtgttgcctgtagccatcatggcctcagcacagccagctgccattccttctgatgagacagctcctggggtgagtgagagtgaccgagaccagaccctgttctctgtgttagtacgtcctccaccacccctctcaagtgtgttcagtgaacaagccaaaaaattagagaagcgaaattcatgcttagccacagccaatgctaaggacctgtatgacatattctatagtagtggtggaaagggggcccctgagactaagggggcccctgagactaagctaagtggtggtccattggccaatggggaaaatagcaacctctctagaaccaaaagttcagacacctcttctacttctcctttgaacagcagtgcatcccaagaggagttgcatcaagatgagggtttggtcgctgctcctatagttagcaactctgaaaagcccattgcaaaaactctggtggccctagggaaatggtcagttgtagaacatgtaggcccaaaaagcacaggcagcacctatggcttcctacagcctctgacaaggttgtgccaaagcaggccttatgaaacaattaccccaaagacagacactttggccatatggacctctagttccttccagagtgacactagtagggatatatctccagagaagagtgagcttgacctgggagagccaggaccacctggtgtagaaccacctcctcaactgttagatatacagtgcaaagaatctcagaagttggtagaaatccacctcagagaatctgttaaccaggataaggaaagccaagagctccgtaaatctgaggattgtagagaaagtgagatagagacaaacactgaactaaaagaaagggtaaaggagctgtctgaggggatagttgatgagggagtaagtaccagcattggaccccacagcatagatgattctaatttgaaccatggaaacagatacatgtgggagggagaagtaaaacagcccaacttgctaatgattgacaaagaggctgaacagtccaataaattgatgacaggaagtgaaactccaagtaaagtagtgatcaaattgagtccacaggcttgctctttcacaaaggcaaaattagactcatttttatcagaagctaggtctttactcaacccacaagatacacctgtgaaaatttctgccccagagttgctgcttcattccccagccagatcagctatgtgtttaacaggtagtccacaagagcaaggagtttcagttgttagtgaggaggggctagagaattcagctccagaatcagcttctagaacttctaggtacagaagtctcaaactcaagagagaaagatcaaaagactttcaagttaaaaagatctatgagttggctgtttgggatgaaaacaagaagaggccagagacctgggagagcccagagaaaccaaaaacagaagcactggagctacaagatgtccatccagagttaacagtgacaatagaaagcaaggccctagaagactttgaagctacagacttaaaggtagaggagcttactgccctggggaatctgggggatatgcctgttgatttctgcactactcgggtaagcccagcacatagatccccaactgtcttgtgtcagaaagtgtgtgaagaaaattctgtatcacctatagggtgtaattcctccgatcccgctgacttcgaaccaatcccatctttttctgggtttccgttagattctcccaaaaccttggtgcttgactttgagacagagggtgaacgaaactcacctaatcccaggagtgttaggatcccttctcctaacattttgaaaactggacttacagaaaatgttgaccgtggcttggggggcctagagggaacacaccaggcccttgacctgttagcaggaggaatgatgcctgaggaagtaaaagaatcttcccaattagacaaacaagagtcactcggattggaattaaaaacaattaattctgcaggccttgggccatctccttgccttccagaccttgttgactttgtcacacggacctctggagttcaaaaagataaactgtgttctccactctctgagccaggtgacccttctaaatgtagttccctggagttggggccattacagctagaaatatcgaatgcatccaccacagaggtggcaattctgcaagtagatgatgacagtggcgaccctctgaatttggttaaagctccagtgtcaaggtcccctccaagggagcaggtaattgaagacaatatggtccctcagggaatgcctgaacaggaaactacagttggtgccatccaggaccacacagaatccagtgttcacaactaagaataaatacctagagctacttgtgagtgaatcattggcttctagaaatcagatgcccagatgatccaagactagtttgttatctcatctggaacctacaccaagagatgcagtcagcatcttaaagtaaatgttcatggaagctaaaaaatttacctcctttccttttccctttccccttaaaacaccagacaaatcgataacaacttatatatatatatatatatctgtaaaaatgtattttgttaatttttttggccaatttattttctcccactttgtcattaaaatcacatgtctaactggctcaccacatagtgtgctttgattgtattttggctttgactctgccatttctgaaatgtgggggaggatggaggcagctgacctctccagttgctgtgttgtattcctacccaatttcctgggcagttgatgcatctctgggaaaaacaccagaaagcttgctgaaatggaaaacttggaagaattgttcatctcttaggcttccatttggatgggcctgccttaacattgtttgaaatgcagcgtgagtagctcttttgtttactgtttacaccccttattggcatgtcaactcctgtacttcccttactctgttgcctttcttgagatgcattgtcctgctaacccacaaacctgtttggaaataaacatggaagaatatctggcaggcttacttttagaagacgacaaatcggtaaggcttattcatggttcattgccaggagcagatatgcttttgagatcacttttatttttgaaatggcctttgttcattgtattgtgatccaataacactttgtattaaattgtttagcagccatttgtgttgtgaaggggtagaagatctctgaaacttgtcttgagattgaactcattccctgttccacaaacccatatgtatcctttcctctacctcctcctttcccaattaatttcaaccatagtacgatgtttggggttgtatattttgttaaaaagattaaagaatttatgagttggcttggacaagtttaactttatttttaatgtgttaattacttggaataaatgcattaatctcaaaaaaaaaaaaaaaa

SEQ ID NO: 1169 - DNA, 1745 bp, Homo sapiens
agcctgacttcagcgctcccactctcggccgacacccctcatggccaaccgttacaccatggatctgactgccatctacgagagcctcctgtcgctgagccctgacgtgcccgtgccatccgaccatggagggactgagtccagcccaggctggggctcctcgggaccctggagcctgagcccctccgactccagcccgtctggggtcacctcccgcctgcctggccgctccaccagcctagtggagggccgcagctgtggctgggtgcccccaccccctggcttcgcaccgctggctccccgcctgggccctgagctgtcaccctcacccacttcgcccactgcaacctccaccaccccctcgcgctacaagactgagctatgtcggaccttctcagagagtgggcgctgccgctacggggccaagtgccagtttgcccatggcctgggcgagctgcgccaggccaatcgccaccccaaatacaagacggaactctgtcacaagttctacctccagggccgctgcccctacggctctcgctgccacttcatccacaaccctagcgaagacctggcggccccgggccaccctcctgtgcttcgccagagcatcagcttctccggcctgccctctggccgccggacctcaccaccaccaccaggcctggccggcccttccctgtcctccagctccttctcgccctccagctccccaccaccacctggggaccttccactgtcaccctctgccttctctgctgcccctggcacccccctggctcgaagagaccccaccccagtctgttgcccctcctgccgaagggccactcctatcagcgtctgggggcccttgggtggcctggttcggaccccctctgtacagtccctgggatccgaccctgatgaatatgccagcagcggcagcagcctggggggctctgactctcccgtcttcgaggcgggagtttttgcaccaccccagcccgtggcagccccccggcgactccccatcttcaatcgcatctctgtttctgagtgacaaagtgactgcccggtcagatcagctggatctcagcggggagccacgtctcttgcactgtggtctctgcatggaccccagggctgtggggacttgggggacagtaatcaagtaatccccttttccagaatgcattaacccactcccctgacctcacgctggggcaggtccccaagtgtgcaagctcagtattcatgatggtgggggatggagtgtcttccgaggttcttgggggaaaaaaaattgtagcatatttaagggaggcaatgaaccctctcccccacctcttccctgcccaaatctgtctcctagaatcttatgtgctgtgaataataggccttcactgcccctccagtttttatagacctgaggttccagtgtctcctggtaactggaacctctcctgagggggaatcctggtgctcaaattaccctccaaaagcaagtagccaaagccgttgccaaaccccacccataaatcaatgggccctttatttatgacgactttatttattctaatatgattttatagtatttatatatattgggtcgtctgcttcccttgtatttttcttcctttttttgtaatattgaaaacgacgatataattattataagtagactataatatatttagtaatatatattattaccttaaaagtctatttttgtgttttgggcatttttaaataaacaatctgagtgt

SEQ ID NO: 1170 - DNA, 2752 bp, Homo sapiens
cgctaaggccgccctccgggtagccgccatgtcggtctccagcggcgtccagattctgacaaagccagagaccgtggaccggaggagaagtgcggaaacgaccaaagaggccgggcgaccactggagatggctgtgtccgagcccgaggccagcgccgcggaatggaagcaactggatcctgctcagagcaacctgtataatgatgtgatgctggagaactactgcaaccaagcctcaatggggtgtcaagctcccaaaccagacatgatctccaagttggaaaaaggagaagcaccatggttggggaaggggaaaagacccagtcaaggttgtccaagtaaaatagcaagacccaagcaaaaagaaactgatggaaaagtccagaaagatgatgaccagcttgaaaatatccagaaatctcaaaacaaactcctcagggaagttgcagtcaagaagaaaactcaagctaagaagaatggcagtgactgtggttcactggggaaaaaaaataatttgcataaaaaacatgttccttcaaagaaaaggcttcttaaatttgagtcatgtggaaaaattttgaaacagaatttagatttacctgatcactcaagaaactgtgtaaaaaggaaatctgatgcagctaaagaacacaagaagtcattcaaccatagcttatctgatacaaggaaaggcaaaaagcaaactggaaagaaacatgagaaattatccagccatagctcatctgataagtgtaacaaaactggcaaaaaacatgacaaattatgctgtcatagttcatcccatattaaacaggacaaaattcaaactggagagaaacatgagaaatcacccagccttagctcatctactaagcatgaaaaacctcaagcttgtgtgaaaccctatgaatgtaatcaatgtggaaaggttctcagccataaacaaggactcattgaccatcagagagttcatactggggagaaaccatatgaatgtaatgaatgtgggatagcctttagccaaaagtcacaccttgttgtacatcagagaactcacaccggagaaaaaccatatgaatgtattcagtgtggcaaagcccatggtcataaacatgcactcactgaccatctaagaattcatactggagaaaagccctatgaatgtgctgaatgtgggaaaaccttcagacacagctcaaaccttattcaacatgtgagatctcacacaggtgagaagccatatgaatgtaaggaatgtgggaagtcttttaggtataactcatctcttaccgaacatgtgagaacacatacaggtgaaataccatatgaatgcaatgaatgtggaaaagcctttaagtatagctcatcccttactaaacacatgagaattcatacaggtgagaaaccctttgaatgtaatgaatgtgggaaagctttcagcaagaagtcacacctcattatacatcaaagaactcatactaaggagaaaccttataaatgtaatgagtgtggaaaagcctttggacatagctcatctcttacttaccatatgagaactcatacaggtgaaagtccctttgaatgtaatcaatgtgggaaaggctttaaacaaattgaaggccttactcaacatcagagagttcatactggagagaaaccgtatgagtgtaatgaatgtgggaaagcctttagccaaaagtctcacctcattgtacatcagagaactcatactggggagaaaccttatgaatgtaacgaatgtgaaaaagcctttaatgcaaaatcacagcttgttatacatcagcgatcccacactggagaaaaaccctatgaatgtaatgaatgtgggaaaactttcaaacaaaatgcatccctaaccaaacatgtgaaaactcattcagaagataaatctcatgagtgaagttaatgtgggaaatttgttaactaaatttaaggttttgttgaaccttggaaatatgctgattttaaagagtgttagaaagcctttagcaagatgtcacaccttgttgtacatgagaaactttgaaaatggatcttcatatagaatcagtggatggaaacaagggtttaaacttgatacaaaaccttttataaaaaatattgttttaactactcaattattataaatgatctacatgttcagattgaaattgaaagctttaaaaattgtgaattatttgaatattcaaagcaatggagaaacaagttatatatgctgacagttcctgtgtttcttcttgttttgtacttaagcaccatatattagagttgaatttgcatatctgtttattgccttatgtaaatgagtgtggccatctgtataagcctctttgacattttcacccagctctttcttaatgtctgtgttggcttctgcatcagcagaaatctttttaaaagggttgttatatatgtaaaaaatgttaacaggaaaatgagagaaaataaagcagctgaggatacaaatgtgctggtagggagcgatattcaagatatattgtgaagtgtgaaaaagtaggttgctgaaccatgtatatagtatgttcccctttgtgtacaaaagggtatgtttgtttaacctctgtctcttatctctgtatgtgtatgtatctttgtatgcatatatacatgtatctgtatgtgaatagactttgaaaaaatacagaataaacttcatggtggttgccattgggcagaggagtataggactggggtctaggataggagcaag

SEQ ID NO: 1171 - DNA, 2646 bp, Homo sapiens
agtttctcctttgttttacgtttgggaggaggtggcattggaaatagcagagtgcttcgcggtaacaggggttggagtgcaatggtgtgatctcagctcactgcaacccctgcctcccaggctccagcgatcctcccacctcagcctcctgaatagctgaccaccagcacactaggcaaacccaccccactcaccgcctcccttgggaattcagacctaaccatcgctgagctgaaacaaatgtactgaggctggagcctgtgtgaacagaacagaagaggccttcactctagtagtgctcacagtccagcaggtgtttgctgaagacagcttactcagatcactactgcctggaggtggttgatatatcctggtgtaaaccttcaagaagggcacaggcaggaaaacatgagccagcaactgaagaaacgggcaaagacaagacaccagaaaggcctgggtggaagagcccccagtggggctaagcccaggcaaggcaagtcaagccaagacctgcaggcggaaatagaacctgtcagcgcggtgtgggccttatgtgatggctatgtgtgctatgagcctggccctcaggctctcggaggggatgatttctcagactgttacatagaatgcgtcataaggggtgagttttctcaacccatcctggaagaggactcactttttgagtccttggaatacctaaagaaaggatcagaacaacagctttctcaaaaggttttcgaagcaagctcccttgaatgttctttggaatacatgaaaaaaggggtaaagaaagagcttccacaaaagatagttggagagaattcgcttgagtattctgagtacatgacaggcaagaagcttccgcctggaggaatacctggcattgacctatcagatcctaaacagctcgcagaatttgctagaaagaagccccccataaataaagaatatgacagtctgagcgcaatcgcttgtcctcagagtggatgcactaggaagttgaggaatagagctgccctgagaaagcatctcctcattcatggtccccgagaccacgtctgtgcggaatgtgggaaagcgttcgttgagagctcaaaactaaagagacatttcctggttcatactggagagaagccgtttcggtgcacttttgaagggtgcggaaagcgcttctctctggactttaatttgcgtacgcacgtgcgcatccacacgggggagaaacgtttcgtgtgtccctttcaaggctgcaacaggaggtttattcagtcaaataacctgaaagcccacatcctaacgcatgcaaatacgaacaagaatgaacaagagggaaagtagtcctccaacaggatgaagcagattaacagaagagtgatcagtgacaaacatgcctcattgattattgtttctaggaaggaatttctaaatcaatattgcaaccccaaaagcggttataatttggtgttactaagatgctcctacactttgtgataccgttttaaggacatggtgcatttttttttcttttatttgttttatttagaactttttttatttgttttatttagaactttgtgtgttcttaaagtgtgcttccaacaggaaggtcagtgataaattttcaaaagcataaccttcaatatattatctgttggattattggatataagacttattttcatgtactataaatatgaaaataactttgatttttaattgtgtagtttccatttcttagcttttgccttttaaatttatacttcagccaggcatagtgactgatgcctgtaatcccaacactttgttgggaggccaaagcaggaggatagcttgaggccaggagttccagaccagcctgggcaacatagtgagatcctgtctctacaaaaaaaattgtttttatttgtatttatatatttttatttttgtttttgttggtaggcgtctcgctctgtcacccaggctggagtctagtgtcgtgatcttggctcactgcaacctccacctcccgggttcaagtgattctctggcctcagcctcccaagtagctgggactacaggtgtgtgtcaccacgcccggctaatttttgtatttttagtagagatggggtttcaccatgttggccaggctagtctcaaactcctgacctccagtgatctgcccacctcggcctcccaaagtgctgggattacaggtgtgagccactgtgcctggccccccacaacatgtttaaacttagctaggcctggttgcatacgcctgtgttcccagctactcaggaggctgaagcaggaggatagcttgagcccaggagtttgaggctacagtgagctgtgattgcaccactgtactccagactggataacagcaagagcccatcttttaaaaaaagtaaaaattaaaaatatacttcatggttcatgtcatagccctagagaatgaaaaatttgcagtagatagtcaataaatgaatcagtagttaaatattccttaaagtcaactgtatttcattgtgatttttgttttctttttatcattgtatcaaactatatggaaatcatatggttagatgtgattatttgataatgttagtccatttgaatccattttagatatttcacaattaaagaatatgaaacttc

SEQ ID NO: 1172 - DNA, 3281 bp, Homo sapiens
ggcaggggcgcatccctcgccacccgcggtcgcccagcacgccgggacgcgcgtggccatccagctccccgggggcgttggggggctccgcgggcctgggcctcgggattcgcccgccgcttccccggggagccgctgctgcaaagccaggttggggcgccgggcccggccagcgccctctaggcagcggaagtgcagcttgctttacatccgtcctccccgcctcgcagagttgggagaaggcagggtggggggtgtggaaaaataaaaggaaaagtccttgcaccatgtagatcagcgtcccccactttggcatcccggccggccggggacctcccagtctgcggccatgaacgcgagcagcgagggcgagagcttcgcgggctcggtgcaaattccaggtggcacaacggtgctggtggagctgactcccgacatccatatctgcggcatctgcaagcagcagtttaacaacctggatgcctttgtagctcacaagcaaagtggctgccagctgacaggcacatccgcagcagcccccagcacggtccagtttgtatcggaggaaacagtgcctgccacccagactcagaccaccaccagaaccatcacctcggagacccagacaatcacagtttcagctccagaatttgtttttgaacatggctatcaaacttacctgcccacggaaagtaatgaaaaccagacagccactgtcatctctctccctgccaagtcacgcaccaaaaagcccacaacaccacctgctcagaaaaggcttaactgttgctatccaggttgccaattcaagactgcttatggcatgaaggacatggagcggcatttaaaaattcacacgggagacaaaccccataagtgtgaagtctgtggcaagtgctttagccggaaagacaagctgaaaactcacatgcggtgccacacgggcgtgaagccctacaagtgtaagacgtgtgactacgccgctgccgacagcagcagcctcaacaagcacctgaggatccactcggacgagcggcccttcaaatgccagatctgcccctacgccagccgcaactccagccagctcactgtccacctgcgatcccacacgggggacgcccccttccagtgctggctctgtagcgccaagttcaaaatcagctcggacttgaaaaggcacatgcgggtgcactcgggggagaagcctttcaagtgcgagttctgcaatgtccgctgcaccatgaaggggaacctcaagtcgcacatccgtatcaagcacagcgggaataacttcaagtgtcctcattgcgacttcctgggtgacagcaaagccaccctccggaagcacagccgcgtgcaccagtcggagcatcctgagaagtgctcggaatgcagctactcctgctccagcaaggccgccctgcgcatccacgagcgtatccactgcaccgaccgccctttcaagtgcaactactgcagcttcgacaccaaacagcccagcaacctgagcaagcacatgaagaagttccatggggacatggttaagactgaggctctagagaggaaggacaccggcaggcagagcagccggcaggtggccaagctggatgccaagaagagtttccactgcgatatatgcgatgcctccttcatgcgggaggactcgctccgcagccacaagagacagcacagtgagtacagtgagagtaagaactcggacgtgaccgttctccagtttcagatcgaccccagcaagcagcccgccacgcccctcactgtgggacacctccaggtgcccctccagcccagccaagtgccccagttcagcgagggaagagtcaaaatcatcgttgggcatcaggtgccccaggcgaacaccatcgtccaggctgccgccgctgcagtgaacatcgtcccgcctgccttggtggcccagaacccagaggaactcccagggaacagccggctgcagatcctgcgccaggtcagtctgatcgccccccctcagtcctcgcggtgtccgagcgaggcgggcgcaatgacccagccggctgtcctgctgaccacccacgagcagacggacggagccactctgcaccagactctcatccccacggcctcaggtggcccccaggaaggctctggcaatcaaactttcattaccagttcgggtattacttgcactgactttgaaggcctaaacgccttgattcaggaggggacagcagaagtgacagtggtgagcgatggaggccagaacatcgcagtggccaccacagcgccaccggtcttctcctcctcttcccagcaagaactacccaagcagacctactccatcattcaaggggcagcccatccagctttgctctgtcccgccgactccattccagattagtgcttaaaaaaacaaaaggagtgggggaaaggaattgagaaaaagaaatcttaagtagaattctctaaaaggtttgctcttaatgttttctttgttttgttttgtttttgagacggagtctcgctctgtttcccaggctggagtgcagtggcgctatcttggctcactgcaacgtccgcctcccaggttcaagcgattctcatgcctcagccctccgagtagctgggaccacaggtgtacgacatcatgactggctaatttttgtatatttagtagagacggggtttcatcatgttgaactcctgacctcaagtgatctgcccacctcagcctcccaaagtgctgggattacaggtgtgagccaccatgcctggccgtggtttgctcttaatgtttttaaggatggttgtgaatccccctggccccataataaattgtaattttatactgcttactataatttttttaacactgtaacaactttgagaccacctctgaatcgtcgcattataactgttgtagaatcttaaatgttaccaagatgattccaatgaggggttggaattaaatgcattaagtagtgaattcatgtgtttgtttccaacttgattttccaactctaataaaggtttctgtccatcttattacatttgtgtagtaaatggtacttcccagcctctcttttgccccattctggaatactccccagagtttgggggtgttcatgttttatacatgtaagtctgttggcatgaaggaccattttctacataatatgacatggatacttgacccaaaaaaaaatgtttagtgctaatgagcagaaaatgaatggttccataataaattgatatctgattaaaatataaaaaaaaaaaaaaaaaaa

SEQ ID NO: 1173 - DNA, 3630 bp, Homo sapiens
gggagggatggggggaaagcaagctggaggacaggtgagacagcaggacaggaccggagcagggccccaagcccccgggcctggtgggggacgcgcttcttcccacactgtgagcctcagcagctccagccagcggacccgacggctgagaggagaagatggggagccccgaggatgacctgattgggattccattcccggaccacagcagtgagctcctgagctgcctcaatgagcagcgccagctgggccacctatgtgacctcaccatccggacgcagggccttgaataccgcacccacagggctgtgctagctgcctgtagccactacttcaagaagcttttcactgagggcggtggcggagctgtcatgggggccgggggtagcgggacggccactgggggagcaggggccggtgtgtgtgagctggactttgtagggccagaggcactaggcgccctccttgaatttgcctatacagccacactgaccaccagcagcgccaacatgccagctgtgctccaggctgcccgcctgctggagatcccgtgtgtcatcgctgcttgcatggagattctgcagggcagtgggctagaagctcccagcccggacgaggatgactgtgagcgagcccgccagtatctggaggcctttgccacagccacggcctctggagttcccaatggtgaagacagtcctccacaggtgcccctcccaccacctccgccaccgccacctcggcctgttgcccgccgcagccgcaagccccggaaagctttcctgcaaaccaagggggccagagcaaaccacctagtccctgaggtgcccacagtgcccgcccatcccttgacctatgaggaggaggaggtggcgggcagagtgggcagcagtgggggcagtgggccgggggacagctacagccctcccacaggaactgcctcccctcctgagggtccccagagctacgaaccctatgagggtgaggaagaagaagaggagctggtatatcccccagcctatgggctggcgcagggtggcgggcccccgctgtccccagaggagctgggctcagatgaggatgccatcgatcctgacctgatggcctacctaagctccctgcaccaggacaacctggcaccaggcctggacagccaagacaagctggtgcgcaaacgccgctcccagatgcctcaggagtgccctgtctgccacaagatcatccatggggcaggcaaactgcctcgccacatgaggacccacacaggcgagaagccctttgcctgcgaggtctgcggtgttcgattcaccaggaacgacaagctgaagatccacatgcggaagcacacgggagagcgcccctactcatgcccgcactgcccagcccgcttcctgcacagctacgacctcaagaaccacatgcacctgcacacaggggaccggccctatgagtgccacctgtgccacaaggctttcgccaaggaggaccacctgcagcgccacctcaaaggccagaactgcctggaggtgcgcacccgacggcgccgcaaggacgatgcaccaccccactacccaccaccctctaccgctgctgcatcccccgctggcctcgacctctccaatggccacctggacaccttccgcctctctctagctcgattctgggagcagtcagcccccactgggcccccggtctctaccccagggccccctgatgacgatgaggaggaaggggcacccaccacaccccaggctgaaggtgccatggagtcctcttaaagagggacgagggccagactgaagcagcacaaggccggggacacccatgccaagcagtgggagcacgcaggacagacacagcaggggtctggggcacggagccttgctggcatcagcatcagcccttcctcccagagccctcattccaattccaagctaagaaggtattggggcagaggctccccaaattggggtgatcccccaaggagtgatacatatattgtgtatatatttacagctgtattgtaaaagtggggtccctgtccccagctgctcctggggagtagaagcaataatgtatttctaatttgtgggtcccacttcggctatgcgggtttctagggggtgggggcttgggaccaaagccttgccccgcccctatgccccttgggggttttggctgtgtaagggggtgaaggactgcccctccctttcgagacccctccttcctggtttctgttcctttttcctggcagtgaattatgcaaagggggccggcaaaggaagggtaggtgggggaaagccaggtggaagcttgaaagactgggggactgggcctgtaaggaaggagccatcccagtccccctccgccctgctcccggcgctgagtcatggggtcgtggagaagggggcggggtggcctgattggctcgcctgcccctgggggcagtagaggggccccgcccagctaggggagccgctccgttccactcccctccctagccctccctccccacggccctgggcagggaatgtcttgttcccgccgctccctccccggggccagagggcagggcgggccgggcggcgtcctaccctcttctcctcctccccatctcctccccgcccaggtgcgagccggagccgccgccaccgctgccgcccctgactcacgccgcccccgggctggcgcagcgaagggtgtgggacagggtaaggggttggaagagccttgtggagagcgggcgagccggcgccatctggcggccatgctctgagtgggcgagcgccccccgcggccactggagcgagctgtcttcacgctcctcatccaccccagctggtgagcggcgcccccttgccaaggcagtgggcacagaacttctcgcttggccgcaggggaaggggctgcggacctgtgggaaagtgatccccttcccagatccttgccagccgggcttcctgtcaggcaggggagaataatccccactctgctcttaggattgaatccacccccattctgtacatagcctcttctgttggtcttgttgaaatctagtttcagatttttaactacccaattctgctgggggtgggggacacccccccttcctcgctgggtgctggaccccttttgcagcctgggctctgccttgcactatttccccttcctggcctgacggctcctccccctccttaaaaggggcaggttcaggggcccggtgctcttcctcccttccatgcacccccatgcccatttgcacagctgcccaggtacccctaacagtggggaggggtcacagggagggggtagcgggaccagtccctgttatctatttaaaaagtgatgatgtaatatattggggtggcggggagatcgggttgtcctgggcctcatcttagcatttcaggtgatggggggagcccagggctggggagacctggggcccagccccagaaagtggggacaatgtggcctcccttctccctactttcggctttcccagtcagtgccttagggggagaggcactccccccctcctattcccttccccccaccccaactcccccacctcgggtgtaagcgacaggaagaaataataataatttaagattcaaaaaaaaaaaaaaa

SEQ ID NO: 1174 - DNA, 5180 bp, Homo sapiens
ggcacgaggtgagccgcaggcttcgggaggcgagggggcggggggagcagcgccgaggccgccgcctccgcctccgccgcctaggactagggggtgggggacggacaagccccgatgccgggggagacggaagagccgagacccccggagcagcaggaccaggaagggggagaggcggccaaggcggctccggaggagccccaacaacggccccctgaggcggtcgcggcggcgcctgcagggaccactagcagccgcgtgctgaggggaggtcgggaccgaggccgggccgctgcggccgccgccgccgcagctgtgtcccgccggaggaaggccgagtatccccgccggcggaggagcagccccagcgccaggcctcccgacgtccccgggcagcagccccaggccgcgaagtccccgtctccagttcagggcaagaagagtccgcgactcctatgcatagaaaaagtaacaactgataaagatcccaaggaagaaaaagaggaagaagacgattctgccctccctcaggaagtttccattgctgcatctagacctagccggggctggcgtagtagtaggacatctgtttctcgccatcgtgatacagagaacacccgaagctctcggtccaagaccggttcattgcagctcatttgcaagtcagaaccaaatacagaccaacttgattatgatgttggagaagagcatcagtctccaggtggcattagtagtgaagaggaagaggaggaggaagaagagatgttaatcagtgaagaggagataccattcaaagatgatccaagagatgagacctacaaaccccacttagaaagggaaaccccaaagccacggagaaaatcagggaaggtaaaagaagagaaggagaagaaggaaattaaagtggaagtagaggtggaggtgaaagaagaggagaatgaaattagagaggatgaggaacctccaaggaagagaggaagaagacgaaaagatgacaaaagtccacgtttacccaaaaggagaaaaaagcctccaatccagtatgtccgttgtgagatggaaggatgtggaactgtccttgcccatcctcgctatttgcagcaccacattaaataccagcatttgctgaagaagaaatatgtatgtccccatccctcctgtggacgactcttcaggcttcagaagcaacttctgcgacatgccaaacatcatacagatcaaagggattatatctgtgaatattgtgctcgggccttcaagagttcccacaatctggcagtgcaccggatgattcacactggcgagaagccattacaatgtgagatctgtggatttacttgtcgacaaaaggcatctcttaattggcacatgaagaaacatgatgcagactccttctaccagttttcttgcaatatctgtggcaaaaaatttgagaagaaggacagcgtagtggcacacaaggcaaaaagccaccctgaggtgctgattgcagaagctctggctgccaatgcaggcgccctcatcaccagcacagatatcttgggcactaacccagagtccctgacgcagccttcagatggtcagggtcttcctcttcttcctgagcccttgggaaactcaacctctggagagtgcctactgttagaagctgaagggatgtcaaagtcatactgcagtgggacggaacgggtgagcctgatggctgatgggaagatctttgtgggaagcggcagcagtggaggcactgaagggctggttatgaactcagatatactcggtgctaccacagaggttctgattgaagattcagactctgccggaccttagtggacaggaagacttggggcatgggacagctcagactttgtatttaaaagttaaaaaggacaaaaaaaaaatctaaagcatttaaaatctagtgaaataactgaagggcctgctctttccattgtggatcacagcacacacatacatacaccctccacctccccatcccctgttctccctctgttgctccccttataaaattgatgttgtctttaccagaaaggtagacaaaaaagaagcagcagcagctcttaaagtgagggttattctcatactcggttccagccatcagcagacttcctgctcatcggcagatccccctttccaacctgtaactctgatgtgctctggatcagcttttaacttttaatcatatattactgtcttctaaatcccttctcctcctctactgctgccctatggttctggctcctaccccctgcggcacacttatcttcaaataccatagaattctaatctctggaggctggcagcttgacttggcactttagggccccttagcagggtgagctgttaaaacagcacacatctctcatcccctcttcctttattcccccctgggtttcagaaaggaaggatatatggggaccacctcccccttctttgatcccagcatctcagtccccctcccaaccctccatatggctctcaatggtgctcacttgcttggaagcaggctcccaatagggagggggctgccctctacagtctctttgactgtaagacagggctctgtatcagtgagacgatgagaaaagtcccaggctaatggcagaaatttgcactttgaacatgtgtgtttttgtgttgtggaacctgagattccttatttattaacaggaagtctgattttttttttttggagtctttgttgctatattttgtggggctgggagagagagattagattattttgacatgggatcccttccataacaggtactttgaaggcaagacatagggttgaagaagcacagccagcctctgaaatcatagctctccagtggcttttaaagaaagctggtcctcagcactaacaaaatcactacaatagcctagtgcttttttggaagcctttttagggaagaatgttaggttcatggtaactagtatgctctttgagatttttacagtgttgaaacttaagaattttgagagggtgaggagggttgttcagaatctaaattacagatagatgattgtttcttgtgaatttgtttcttttcctttttttttgtccctaccatttccttacatttcccttggggcccatctctggctccttgctttttgtttcttgctttgctttatcagttcattccagctccctgttagtgaaggacactgctgttagtgaaggaacaaagtctatgagtcctaaaattttaagtcaaagaaaactgctctgtttcccctttagtaacacttctgaagaggaaaaacttcaatgagccaaagttaataatcctatataataattgctttggctttcacctaaaattctgggcatcacaatttccttgggatagaggttgtgttggggaatagattgcttattgctgttcactggagagaaaaggtagtgtttttgtacaaggtcataccgccagaagccccaaatcctattttggctcatcttcaggtaaagagtaattcctatcctgtgtgcctcagaagctagaatcgaaggcttaccctattcattgtttattgtcagaaatgcatgatggctcttggaaagaatgacgttttgctggaaaaaaaaaaaagaacagtttgtgtttcacaaacatggcttatcaattttttcaaagaattcttttttcccaaaaagaggagtaacaaaatgtcatttctgaaagaggcttactttataccaactagtgtcagcatttgggatgccagggaacagagagtgagacacctacaatcaccagtctcaaatgcgctattgtttcttttcagagtgttgcagatttgccatttctccataatatggggatagaaaatggaataaagatagaagggatgtagaatatgctttcctgccaacatggtttggagtcgactttggtatattgactagatttgaaaatacaagattgattagatgaatctacaaaaaagttgtcctcctctcaggtcccttttacactttttgactaactagcatctatattccacacttagcttttttgtcacacttatcctttgtctccgtaaatttcatttgcagtggttagtcatcagatattttagccacctacacaaaagcaaactgcatttttaaaaatctttctgagatgggagaaaatgtattctcctttcctataccgctctcccaacaaaaaaacaactagttagttctactaattagaaacttgctgtactttttcttttcttttaggggtcaaggaccctctttatagctaccatttgcctacaataaattattgcagcagtttgcaatactaaaatattttttatagactttatatttttccttttgataaagggatgctgcatagtagagttggtgtaattaaactatctcagccgtttccctgctttcccttctgctccatatgcctcattgtccttccagggagctcttttaatcttaaagttctacatttcatgctcttagtcaaattctgttacctttttaataactcttcccactgcatatttccatcttgaattggtggttctaaattctgaaactgtagttgagatacagctatttaatatttctgggagatgtgcatccctcttctttgtggttgcccaaggttgttttgcgtaactgagactccttgatatgcttcagagaatttaggcaaacactggccatggccgtgggagtactgggagtaaaataaaaatatcgaggtatagactagcatccacatagagcacttgaacctcctttgtacctgtttggggaaaaagtataatgagtgtactaccaatctaactaagattattatagtctggttgtttgaaataccatttttttctccttttgtgtttttcccactttccaatgtactcaagaaaattgaacaaatgtaatggatcaatttaaaatattttatttcttaaaagccttttttgcctgttgtaatgtgcaggacccttctcctttcatgggagagacaggtagttacctgaatataggttgaaaaggttatgtaaaaagaaattataataaaagggatactttgcttttcaaatctttgttttctcttattctaggtaaggcatattaaaaataaatatgtaaagaagaaaaataaaagttgtcttcatggaaaaaaaaaaaaaaaaaa

SEQ ID NO: 1175 - DNA, 167488 bp, Homo sapiens
gatctttcttgcatggcctcagaaacacgtgacccacgttcagaagtcctgaaccctgaggacggaatgccagtggcaccttcccccaaatcgagtaaacaaccagcatcattcccacacatttttaaaagctgcagggaacaggacaacacaatctaaggacgaatgaaaccccaaaacttgacaattcacctataaaatataagaaaagcccttgtcgtgccctcgcatgctggtcaaagtgctctcacttacactctttttggagatgtcccccaggggtgctgggcaggaatatttttcctctcctccatgcccaccccatccccagccaatccccctcccctagtttcccacagcagaggcgagaccggctggaacacggaatgaaatttattgaagagaaacatatactgaaactattgaagagaaggaaaccacaatacagagagaaactgtaaacagccaccacaggccacaggtcccaggccccctcctcctggggttcctggcaaggcacgtcatctgctccccctcccgctgctgcccccgctgccacctccctccttcccgagggccccagggtctgccttttgccaggacagtggactctggcagtgtccactggcttcagggagccccctcctgagcccatccctatggccttcacaggacagtcacagaacactgggaaacaccagggaacaccccaccaggctgaagaaactgagtcacaagtaacaacaggggtgaaacgccaaagcatagttcttgtggatcctcacgcagccccgctgtgccccgggtccggttcttcttcccgcagtcagggtcaccatcgtggtcacggggtgagcgtccgccgtgccctggtgcctccttcccgccatctcctgggactgcgctgggggtctccggggagaggctgctcagagaagaacacacgcagctccacgagaacaagcagcccctggcctagatctacgccaggaaagcagaggtggtgctcacgatgcaggacagcagcaagcagagcctgggctcgcaggaagctcacagcacgtgccccgggcccagaggtggccgcctgcatgggcgcacagtacatgacttttcgcagaaatgatggctagcagtgggtgggcgtctgctgggcgcgtgggtcacacaggtgagggtgagcttcccggaacagagggcagcctgccccggagatggcaagtgggctgacccctcttgagagacccaggcagctggcaaccttgagagggcctctttccccctgtctctcccaactcacggcctgggttgggggcagacatcttcaggtgcccccacccaggccacagctgcccactcagggctccctccaggccagccccccgtggcggcagggtttggggctggggctgggtgtgctgggtgcaagggagcgggggggcgcctctccccaccccattttgtatcaaacgtggtcatccgggtcacagggaaggaatgggggtggtgaccagagccccttgggggaggtggggggcccttactcctgaatgtggggtgagggactggccctggcctggcctctgtctgcctccaaggcgctgctgcctgagaggagaggaggccccggggccctaggagcctatttgccctgggaggacttgggctggccctcgtccccggccccatcctcatcctcgttttccggctcctccaagatggtctggagcccctccagtgggggtttcctggcttcctggcctctcacctggatgaggccctctggaccccagctaagacctcttgggaacacccagacagcactgctcatccgggctggggaggagccccaggggacctctatgggccttgcctgacctaggccttcggggcctgcaggggcactttcaccttccccagcggcaggggctccccttgcagcctctttggtggcagaagcggcctcggcagcatcttctgctccgggaccagcctcgctggcattcccctgggctggggaggcctgggcagcagctgggtcttcactctccactggggccgctgcccaggccacaccctgctggctcctcgctgggaaggctgcccatgcctccatctcccggatgagccggagcagccccaggaagccaggtggcctcttctccagctgcatccctctcagggtatcctggagtgcctcgctggggcgggcccaagacagcacctgctgtagtcgcaggtaattggccaaggctgggcagacggcccccttctccacagccctctgcagcaggccttccaggcgcaccacgaaggcaaacagcccctcctggggcccctgcgtgcaggtcaggaacttcagcctcgaagtcattcgagtgtcctggttcctaaatacctgccccagcgccgccaggcagtccagcgcggacaagttggtatcttcctccaggaggccgctcacgacttccagggccgggccgcccaagctctccagcagccacctcttcttctccctttccgacgcatggcaccacagctgcagcatatccttggcatgctccacccagctctcaaaggactcttcctcgcagcctggctgctccctcctggaaaagggtctcaattcccggtaggccctgttttccagcacaggctgtagggtgcagcgccaaggctggacccaggcttttgttacatttgtccctcctgcttcacccacagctcctgcctcacctgcagctcctgcctcacccacagctcctgcctcacctgctgctcctgcctcacccacagctcctgcctcacctgctgctcctgcctcacctgctgctcttccctcacctgcgcctcctgcctcacctgctgctcctgcctcacctgcgcctcctgcctcacctgctgctcctgcctcacctacacctcctgcctcacctgcgcctcctgcctcacctgctgctcctgcctcacctacacctcctgcctcacctgcgcctcctgcctcacctgctgctcctccctcacctgctgctcctgcctcacctgcgcctcctgcctcacctgctgctcctgcctcacctacacctcctgcctcacctgcgcctcctgcctcacctgctgctcctgcctcacctgttgctcctgcctcacctgtgcctcctgcctcacctgctgctcctacctcacctacacctcctgcctcacctgcgcctcctccctcacctgcagcttttgctactgcttgaccctggggctgtgcaggaaaactgggcatatcctgaaactcaataacaggtacttggggcaggaagatcactttccagggccccccattgcctggtatttgatggggaatcaagcttcggtttaaatactcagcgaactccaccaaggctgccttggccccgagctcctttctgaagtgcttggtgagtactcggtacctgcccaggggcgacagggcagcccgcacggcctcctggaactcatgttccttgcagtcatcagggatacccaggatgagcagggagcgctctgcgttcgcacccatccacctgcaccagtcccgaagcatcgccagagccatcgcagaggacttgagggagggagcctgatcaatcaggaatgtgtgctgactgttgcagtctccgacacagcctgtgagtgcaaagagagaagcttgtttgtgccaaacactcactcccaccactcatctgcccctacgtgtgtgggggtgagggggcagggctggagttcctctgcctccttgttttgtcgctttgattttagtgaaattttgatggcaaaattaaatttatttgcaagatacagggctagtcacattttctatgctacttggtgccatttgtagtaagttactttttttcccccacaaaggaattgggaagcttatctcagttttcaaaacttttgataaaaacttgttcacaatattccctctttatctttttaatgtctatatgatctgtagtaatatcctgtccttcattcctgatattgattagtgttcattctctcttgtgtgttgtgtgtgtgtgtgtgtgtgtgtgtgttgttttttgtttgtttgtttgttttttgagacagggtctcactctgtcacccaggctggagtgcagcagcttgatctcggctcagtgcagcctcgaccccctgagctcaagcgatcctcccacctcagcctcctgagtagctgggactaccggcacatgctaacacacgtggttaaattttttgtactttttgtagagaaggggtctcactatgttgcctaggctggccttgaactcctgggctcaggcaatcctcccgcctcagcctctcaaagtgctgggattacaggcataaaccactgtgcctagccccctctcatcttaattagtcttgctagggttcattaattttggtactctttaaaaagcctaatatcggggtttactgattgtcctttttatctctgttatttctttatttgactcattctgtgtttacttttgctctttttcgagcttctttaaatggactgttcggccattgattttatgttctttttttctgttatgagcactgaaagcaagaaattttcctctgaccacttccttccttccaaatggctagtaatttgggtaagttgaatgttttgtgcagtttgaaatatcttgtaagttccttggtgatttcatctttgacccatggatttcaaaatatctagacatatgttattgttattaatttcaaataaaattccactgtgatcagagaacttatgaaaacgtgcgatccttttcagtttctgaagatttttaaatggctcgacatatggtctatctaagtgaatgtacaatttgcccttgtcatgaatccgtattttctacagaggccaaggtctgccccctccaaccactgcaactcctgtcgccattccccacgaagaggcgacctgaagcctttccaattccacctgtagggggccaggctcctcacggcactgccacgccgacagcctccagggggcgctcaccgtcgcctgtaccactggccgccaggcagcctccggctccgcaccccgtgcacccttaggcattggccctccttccagcccatcccccaccgcacaccggggacagtcccttcctgcccccaacgtgcccttccacactgggcgccccctaaacccagctggcagcactccagtctagccccgggcagcagggcgtcccacgtgcttagacatgagcctccctctgtggcctccccacagccaggggcccgacaatcccgccctccacccccaagtcaggagcccccatagcccacagaggcagggcaccctccgctctggtcggccctccaccgggcttaggaatcacctctgccctcacccacccagccctaggacctgaccacggcacccgccaggggccgtcccctctcgcgcctcagacccaggctgggccgccctccgtcccgccccacgcttggagcccgccagcctgctctcccacgtggcgctccacagcccccttgccctcccaccccagggagccccctcccgacccccagccccacagccggaagccctcgacaccccctcaccccagcactgggcgagtcaccctccctcttgcctcttctaccccgcgtgcttggcgaccctctccgcccagggacccaggggtcctcctctggccaccccgcactgaggaacccctcccctcagccctccttccaaccgccctcccgagggggccttccttggcgggaagcccaccgtgacagccacgccgcacctaaaccgggccaggcgggaccgccgccccccagctccgcagccggctcctcacggcctgccacaccgcctgccccccccccacaccccgggaacctcctgggccgccatcctgagctccggcaacacctcctgggcctgggtcctggcaaacccccgcggtctactcactttctcaaactctgggcaattccgggtctctcagtgggaagtcagatatctgggtctctccgaagggtctgaagagatcacctcagctccgcagcgtggaagcgtgtggctctctgaggcacttggcgccaacagtcacccgggctcccagaaacccctggttctcccggaagccacagggagttccgaaagaaagttccagactggtgtcgctatgcaaggcaaatgattggatagggagagcacaagagaggagcacgtgggaatgcactgttgttaccatgacgactacacgtgaatcaaaaggtggaaaggctcgaagcccagaagcggcaggcacaccgattgaccctccgccaatggaaaggcctgcccacgaggatcggcggagtacatttgcaaagcgaaagttcattgcggtaaatcggtccaattttttccactgtttgctttccaatgtgcttggtaatgtcataaaaagatcctatgttttgttttgttttgttttgttttttgtttatttggtttttgttttgttttgtttttgtttttgtttttttagactgagtcttgttctgtcgccaggctggattttttttttttttttttttgagactcgctctgttgccaggctgcagtggcgcaatttcggctcactgcaacctccgcctcccgggtacaagcgattctcctgcctcagcctcccgagtagctgggactacaggtgcgcactaccacgcccagctaattttggtatttttagtagagacggggtttcaccatgttgaccaggatggtctccatctcttgaccttgtgatccgcccgcctcggcctcccaaagtgctgggattacaggccctatgtttttattgatcccttttctagcagtaacaatgactggggcaggagtgttaaaatctccaattataattgtgaagatgccgatttctgtctttattctgtcaacttttgttttatgtattttgaagctctgaagctctgttattgggtgcaaacatatgtatgaattcgatgtgttcctgattaattgatccttgtatcattattaccttttattttaccttttcagcaataacattttgcattgttttctagtggttgctctagggattcctatatatatcctttacttttcactctctacttacagtttacattgtaccacatcacctaaatttaagaccattttcattatacagattactgccccctgcaccccgtcctttatgctatagttgtcatatatatatctacatgttataaaccctataatacattatttataattttaccttaaactgtcatgtgtattataaataacttataaagataaaataaatattccttgatatttacccacatattttgttattcatttctacccaaagatcgagatttccttcttttccttaagatcgaaagtctttctgtagcatttattttaatgcaagtctgttgatgaattctcttagctttcatgtatctcgaaacatccttatttcaccttcattcttaggagtattttccctggatatagatacagagttctgagttgaaaggattgtttcttctctctcaccactttaaagatcctgttccattctctcttggtttccattacttctgatgagaattcagtagaacttgtgaatgttctcttcttcttcgagttgcattttactgttttcacaattcactcattactctttgttttcggtactttgactgcaatgtgcctacacgtgttttttctttgtatttatcttccttggaattcactgagctccttgaatctgtaaattatgtctatctccaaattttggaaatttcagtcattatttcttcgagtagtttttcttccccattctctcccttctctcctaggagtccatatacacattcattagacctctatatattgtcccacagctcactgaggcgcccttttcattttttcctcttggtttttcagaaaagattatttctatttatctgtaagtttgcaactcacctgtcatctacaatgttattaagatcatccagtgaagattttacttccaatgttgtttttcagttcagaacttacccttggttctttacttacacttgcaacttacacagtccttgatttatgacggtttgacttatgatttttcaactttacactggctttactgggacatcaccccaacctaagtcaaggagcatctgggtttatcgggacattaaatgcattttcaaattaccatatttttgacttactactggtttgtcaggacttaaccacagtaagtcaaggaacatctatagtttctatttctcttctgaaatttcctatttgaaaaaattcataatcagtgagcagtgagatgggtttaaaaaaaaatgttaggtggctgggcatggtggctcacacctgtaatcccagcactttgggaggctgaagtgagcagattgcttgaggtcaggagtttgagatcagcctgggcaacatggagaaaccccatctctacaaaaaaatacaaaaattagctggatgtggtggcacatgcctgtaatcccagctacctgggaggctgagatgggaggattgcttgagcctgggaggtggaggttgcagtgagccatgatcacaccactgcactccagcctgagtaacagagcaaaactctgcctcaaaataaataaattaataaagtattagaagcatgcttctttttttttttttttttacacagtgtcactctgttgcctaggctggagtgcaatggtgtgattatggctcattgcaacctccacctcccaggctcaagcaatcctcccacctcagcctcccaagtagctgggactacaggtgcacgtcacaatgcccagctaaattttttgtatgttttgtaaagacagagtttcaccatattgcccaggctggcctcaaactcctaggctcaagcaatccacccacctcagcctcccaaagtgctgggattacaggcagaagtgtgctttatctccttaagaatatatatttttttaatattgtgaattactagggtcatctcagaggttggattctcttgaatgcttttttccttgagtatcaggacaattcttgtttcttgtagtaatctagcattatatcctagacactgtccataatgagttctagtagctttggcttcttggtttctgttatatttctccgaagatgagtcattgtttgttattgttgttgtggtggtggtggtggtggcggtggtggtttgttgtcctagtagacaactaaactagctaaactcacactaagtctcccctgtgttgggtatcaactgcaatctccagactccgtttccacggtattgggcatcagctgaaacctctgctcagttcttttcttggactctgccttgtgtattaatagccctggggtcagccagagatttgggccaagtgtacaggccaaatacggggctcctccacatggtgcttctctgctcccaggtgatacccctcatgctttccctctcccgtggccatcccaaagtctactctctgagtctctgagttttggtcacccagcacggtgtcctctgtggcccatgctcacatgtaagaaactcacctagtgccagtctcttcttcgaggtgttaaccccctatggtttctgcctctactgcttagtccctcatgccatcagaaggttttgttgttagtatttcatcctggtttcatagatgtcatctgtgggagggttggtctgataggagtgactccaccattgccgaaggcagaacctgacttaagttttaacaagatccctggggccaacactatggcaagttttaacaagatgccccggatgacagtttcgctgtcgccttgtgagtgaccctaagccggaacctcccagctaagccaccaggagtaatttgttatgtagtgatagataactaaggctctaacccccactttgcttcaagtgttgtcgcctctccaacccatcctctcattcatgggacctgatgcagttatcataggtgactaaaaagaggatttgaagaatacgtccacaaactctgtgatactcccctttcaagaggtgtagctggatccctctccctttgagtggagtctagacttagtaacaaagagttcagcagaatctgtgggctgtaactggcaagcgtggcttctcagagaaggcagcgtgtgtcttgggtgctctctcttaccttcttgcacttgtttcccctttctcctttcctcccccgccctttcctccctccctctccctttccccacccttcactctgtctccccacacacacatagatccccctgcctctctcactctctctctctccctcaccccccaaaatagatcactgttttgcaggaagccctgctatgagcagccctatggagaggcccacgtgctgaggaactgagctacttgccaacagccatgtagccacgtgagtaagcctggaagtggatccctcagccccaattaagtctcagaggctgctgccctggatgaaagtttcactgttgcctcatgagtgaccctaacccagaacccctcagctaagccattgggagtaatttgttatgtaacaatagataactaatactctaatatccccttaatgcccagcagtctacagtggccggtgagatttcctccaagcctactcttctgagcagcattgtcttagtaaatggcaccaaaagtcacccagggaggcattgcctggtgggccatcaatcccgcaagtaatatgaagcctctaaatattcataaccatgaacagacaccaatcttagaggaaagatgaagtaagaagagtcaaaaaaggactctgcagagagctgctcaagttctgagaagcaaaccaagggccagtggcatcctgagcccggggaggggagcatttaaagcagcgggagattcgacggcatcggcggagagctagtccctcagggttctcagttgcacataacaggaacagactggctgatggaagcccagggaaaaccagctagagggtatcccacaggcgtacctcgggcctcacactcagtgggtagtgggtgtatctgattggtagagcctgggttaggtgcccatgccatagctacaagggaagctgggaaagcccagacattttccactcctcttttgggagggaagctccccatcaggtgagagaattgcatgtgcaaaggtcctggagctggaagggacatggagagtactgggctgaaaggtcggtgtgactgcagggttggggatgccacgcaccaatgctgcggaggccagacagtgcagacctcatggacctcagaggggtttcatcttcatcctgaaaaagctgagaactcactgacagatgtgaagccagtgctgcacatgcacgcacagacatgtatttgtgtgagtgacacgaactcattgcattctaaagagttatctctggtttctttgtggagaaattatttggggaccagagtggatgcagtaagactagctaagggtggctggagttgtcctgtgagagataactagcctagatgacatcaaggacagtgtcatggagcagatagagagggtccgtttaacagacctaaaacgtgcagagaactaaccagacaccgtgaatgatgggaggtggagggtgggcaagggatgtatccccactttctggcctttgacacaggcgtgttccattcactgcagctggggacttggtaagagcgctagccctggcacgagatcacaagctcagttttggatgtgtgcattggcgcatccaagtgcaaataccaaaaaagcaggtgcatccaggtggggacatgccaggcactgaggctggggaggccagccaagaggccaggcacagccacgctccagctcagcctccgggccagtagatggctaagccttctcctctgccaggaagtcttggcaaggctgggtgactcttcagctccttacccttggtgaccctcctggctttggtccctatcacctgaaggaatgtctggagactagacactgctggctgccctcccagcagccattccccctcttttttcctcagtggactcctgcttgttttagagtcggggtctcgctctgctgcccaggctggagtgcagtggggccataatagctcactgcagcctcaaactcctgggttccagtgatcctcccacttcagcttcccaagtagcttggactacaggtgcatgccactgtgcccagccaaaacttttttatgttttgtagagatggggtctcaccgtgttgcccaggctgatctcaaactcctgatctcaagcagtcctcctgcctcagcctcccaaagtggtgagattacaggcatgagccaccatgcccggctagaagcccctttttgttccagcctccgtccctcccccacgtggctcagggcatggtgactcccatccccaaatccacaggtggctcctgattggttcaaatgcagctgcacatgtgttcctggggcaactgttagtgatccgagcagtccatggcccaaatggcccagtcagaccaaagggaagttttcagattttatccacagaggaggggcctctctttccttgagcaggaacaaggaagcacgtgatcccagcggacactgacagacattctctagcacacaggcagcagcctgaagccagagccaagacttgaggttggaaagaggctggggcctgggtgacagctcaggacagtgaagccactggagggggcaccataaggatagctgtggccacactgggagggatagttgagaaacagttgtgatcagactgggagagtcagtgaagggagagggaggccgtcctgggagggacagtgagaacggcagtggccacactgaagaggatcagcagagggccagtggtggctcccctctgggacattcaggaaccggagccacagctgcagccatgagagaagctgccactcaggcagtggacggccacctcctggggcaggtgcccagctgagcttcagggcctcaggcttctgaaggccaagacagcctgccctgaggcctgggcattgctccctcctggcacccaggcctgacactattgcccctaccggcctcatcctgagggtcccatcaatcctcaggggtcgcagggttggacaaactggcccacatgacacaaggcattctccatgccatgagccacgcagtactccgacccttctgcagggtcaaggagcaacctgcgtgacctgaggcattgccgcgtgcattccatcccctgctttccccagagccactgtctcctgggactgcagcctggacatcccctcccccactcactggctgcaccccatctacagcacttttctggcaggggggcggaggcaggagttgcaaaaacagctcatccagtccagacacacatcctgtccccacaggagctcacagtcgccatcaccctcagtggatatctgaggctggcagcatattcccaaggctctgcatgcagcccaagaccacctccctccaagggcactccagcagagcagtcagccacagcccagctgacccctgggagaggtgccgccctgacccctgccctgctgtgaaggtggcttacagccccctttggcctggccttccccaacttgctcactcacttcccacagacagcttgacgtcaccctggacctccctgctgggcccctgggcacctgctgtggcttgggagaccggctgccaacctgcccccaggagggggctgcctgtgacctggcgggtgcccacggcacagtgggcagcaccacagctgtgggaaagcgcccactcccctgccccccggctacctcacctgcccgtcctgggccagcctagggcaaggggagaacgggagaccagagctggggagcagccaggccagccggactgtgagagggctaggtgtggtgggaacccagggaggaaaggggacctccccacttccagaccccaactcttcctccccaggttctgaatccgggtttgctgcccgggaggccctgcccctgcctaaagcagagatggagatacctctctcaggaggccccaggcctcagggccacaataaggggagtggagaggaggagagagggccgtgtgaggaccgccgggagggcccgtgtgccctgtcatcctctctaggttgggcatgggtttgcagttctttacagtaaaaaactgaaaacatgctggaagggagattgatctcccgacaggatcgtgggcttgtcaaggtcgtcttcacttgctctaggcgtcgcgctcttcagctgaccgcgctgccgcctccaccaccaatgtgtccacacacgcggtgccaacaatggtgcacacggtgacccctgctcccccatttctaagcttgtgtgggacccgcagcccagtgcacatggccctttctcttgcagtggaagtggggtgcactcccaggggcccccttcccctgcccgaggcacacactccccagcctccatgcaggttggccgctcacactctctggaaatgagccaaggacaacaggagctgccttcccaaggtcgccccagtccccaccaggttactggatgatgcgggtgcaaaggtccccccgccccctgcctccatggcccaggaggactctgggctcagcctattccctcgtgtcggagtggcctgggctgccgcagcaaatgaccacaaaccgcttggcttcagccaacaggaattgactctcccagttctggaggccggagtccagaatcgggcgcttcctccggtggctctgggggtggatccacccacctcttccagcttctgggggccctgggcactccccaccttcgcctccacatggccttctctgtgtctctctctcctgtctcttctaaggaaactgtccttggatttggggccccctggatcatctgggttgctctcatctccacatcctcaatttaatgacatctgcagacaccctttatttgcatataaggccctgatcacagtgcctgggtgttaagatatggatgtatctttcaaggggcaccaaccagtcaccccacaacatctcaacagcccagatcccagcctgcccagccagagccccggtgaagggacaagcttgggcaccaggacacacagctgagggccaccgggagactccctgcctctgcgccgggaaaggggctccgaagctctccctgcactgggccccctgggggccctgctccctgcaaccggaggttccctgagcagcgtcctcgcccttcccctatgccccagatggacggcttttgttctgggagcgcaggcttgccgagggctccttgctgcgggctaagtgctcctggccagggcccagggtctctgaagaaaagaaacccctgaactctggttcaaaggccaaggaggctcccgcctcgtgctcagttcccagtggccggggctgggatatgtgatgtggctgatttttccctgttgcttttcttttacggtctttttcatacgcttcactatttgtcaaaggtctcacaattgtcatcagagcaatatcccaaccaaccttggatttcactccctgctctaccacgtggagcatgaccctttggaaaatgacaaactccaggtgcgatcccctccggtaacctgagggaaagccagatgcacccagagggtcttggcttcttgcacttccctgacctcctttttcccctcctcgtgtctccacaccatgctccctgagtcacctttcacctcttccccgctctctgatccttgccatcctgggtcactcctttactgagtgaccatggccggggtacttggtgctagctgccctgcagaggtcccggggaccccagcgagatgaataactgaatgaatggacgtaataacgcccaggggtctagcccatgggaggtgttctgccaacgcgggtccctcccgtccccttcaggagccgcggtgcgctgaccacttcgaccccagccttcagagcagcccagacagaaagcggaagtgcctcggggcgcgtggggagccaggccagacgcccctgtggggcgggcgcggggcgggccgccatccctctgcgccgcgcatgctccatgccccccccacaacgcgccccgttcccacgctgccgccgccccggccccgcccgctcccggcccgctcgtcggcgcaccagactgagactccccttcaggacgctcttcgcgagcggtacccagaggcgaagtcgagacaagcccaggagcccccaccccccgcccgcgtttcctggggacgcggcctcggagggcttctaggaggaggcggcggccttggcctcgggcctgccgggagcaggaagggaggccgactccctcggctgcccgccgagcccaggtaagagggccgagctgggccgcaggggtgcgggtaagcgggtaaggggcccgtctcggcagggtgcaggtgtcgagggggacgagggagctgcggcggcggcgacaagcagggactccctgggaggcgggctagcactgagtggccggaccagccctcggggccgccccgtaccaggggcgccaggggaagagccatccagggctgggcgctgggagctgcggcccgtgtctgtcaatttctctcctgattggtttccagccaccggtcccgaggctggctaaagagcatcctgtcgctgatctgcctggtgagtttggattttgcacctctgggtgtgagagtgctgggcagactggcattgtgaggttgtggcaccgctgcccaggcaccggccctgagggtctccagatcggggcaggatgcccaaaattgtgctccagagggtatcaggtgggggctggtgcctcgcggtggtgcgggatgttgaccaggtgactggcatgccacggaaaagcatcagcttagccaagccaaggaggaagcgaagggccgatggaagtggtgggcaagggtgagagaaggagccagctgagctgggcagaaagcggcacccagcgcttccctacagggctagttgtgactgattcactcccacagatacctcctgagcaagcatttgagatctgccagggacacggcggtagtaagccctgccctgttgttctcgttctagtggctgagcgcagacaataagcagaaaatgttttccattagtaattacagagtctgttaaaaggcagtaagagccggggaagggaggtctggttgccagtttaggtggttagaataacttattctagaataagtctcatttctaccaaaacttgaaggtggtaaaagagcgaggcatgtggttatggttttggaagagcattctaggcacaaggaatcccctgtacaaaggccctgaggcaggggtggcctggctcaagggagcaagagtgtggcaggagcagagggaggtgcagaggtgggaggagggttgggcaaggtcaggaagggttgtgtgagtttactctgagtgacacgggcatcccagggataactgtgagcagagaaggacaggacccgacccgcctgttagaaggatccctcagcgagcagcctgggtggcccccttttggctaggttaccctctgcccccagagggcaaggcctgcccagctgcaaggaagctcctcagaggactttttcaggctaggctgcatggagggccccggtcgacccatgcagcacccaggccgggccttggctctgggtttctccagtttccttctccagccgttctgccaggtgggcagcaggtgactagggcctcgggccaaggaaagctgatggggctgagagaagcaagatcccccaggacggaagaaacccaaccaaagtggtgatgcctgtcccttgctgtggatgaaaaagcccaaattcctgctcccaccgagtgggactgctggatgcttttctgattgttgtttgtttgtgtgggttcttttttctttttctgggaatatctccccatctagtggtcgtcttaaggcatcctgctagagccagctctccccttggttggccaggcttccttgctggcagtggccctgctctcatccccttcccagccctccccgcgtggagcaccctgcatactcagttccacccataggctaaggtccgcaagcaggggtcccgggtccgaggcccctcacagaggtggagcagccctggaggggccggcagtggcaccggtcacccaggttgatgggcctttctggctcctcacctgaggcgccaaggtctggtggattctcacctgtgtgcccgatgctgtgcctcggggaagcctggcttcagagcccaggattatccttctgcttggcctctgctctgctggtccccaaaggtcacagggtcttgctggtccagctggaagaagctgctctctagttccgccaggtgccttccaggtgcttctgtcctcagatgcacggagtagtgcccacctgggtgttatttgagttctatgggcacagggtttgtcgtgtctttctttccaggagttgaaattgtagatgattttcgggaactagctctcaaggacaggcactgctctgggtgacggcttggtgtggccagcacctccgctgggtcttccgatgctgcacttgagtgcgggtctccgtctctgggcggcctcccgccgatggggtgttcactcagggggtcaccactcaacagtgctctgctcccttggggctcagacctgcctcagtaatcttggggtggagggactagagataactcctccccctttcaacttgtccaaaatgggtagtgaactttcagtactgttatggtaaggaaaaaaatgagcttatgctgcttttcaaaacaataattttatactagtctgaaagcactggcaaattatcagtaatacctccccacgcacctttagttttgcaggggtcccagtgactgacagtgtgttataatgaaatgaggtgtggcctgcggacattagaatgattttacctacaggaacatttcttttccctcctttttgattgaggtgagattcacacaacataaaaattaattttttgagacagagtctagctttgtcgcccaggctggagtgcagtggtgcaatcacggctcgctgcaacctcaaccttcccagttcaagccatcaccccacctcagcctcccaagtatctgggactacagacacgcgccaccacacccagctaattttatgtattttttgtagagatgggatctcactatgttggccaggctggtctccaactcctgagctcaagtgatccacccacctcggcctcccaaagtgctgggattataggtgtgagccaccacgcccggccaaattaaccattttaaagagaacaattcagaggccatttagtacattcaccatgttgtgcagtcaccacctctacctggctccagaacattctcatcgccccataaggaaacctctagacccattagcactcactccccatccccccacccccgggcacccaccaatctgccttctgacatgatggatttacctgttctggacagacatgttttatgagagttaaaggttctttggatgacaggaccctgggatagatgaaaggcacagctttttgttctgtatagctctgaacgagagaaggctgccaggcagggccacacagaggttagacccggggaccgggaaacagcagctggggccggaaggggccagcagaggcgggtggctaggtttctccagcttcctttggattgattgagttgcataagttttcaggctccaggacataggggctgtccctacttgtctggtgcctggccccagagtgtgggggcccaatgaggcaggggccgttggagtgtgtgtttggtggccccagagagagggaaattgtaagaaaagtggtgggagtggggacttagcaaactgccctcgaagggcatagagatgagaggttttagccactatttcaaaactaggtcaagacggctcttgggaaatgtgatgttacatcacaaaatggaatcatacaatatgtgacctttcaagtctgcatctggcttctttcactgagcagtgtcctcagggttcatccacatggtagcatgtgtcagaatttcctttctttctatggccaaatacttttccattgtatatataggctcatggtgttggtccatccatccatcgatggacatttgggcttcttccacctttcggctctagtgattaatgctgctgtgaacacaggtgcgcaagggtttgtgtgaaccacctgttttcaattctttgggggtatatacccagaagtggaattgccgggtcatatgataactatgtctaactcattgacaagccaccagtctgttttccatagtttttttttctttttaatcaccatcttgccttttttgtgtcagcttttctctctttctctttgtgaaaggttttaaagtaagttgcatgccattccctcccccaaatgcttcaatatgcatttctttaaaagggacattttcttccatgacccagtgccactatccatccaacacatgagcagttatgatcccctacttccttccgagggccaccccataatcaccctctcccaatgatccctaatccctttgacgactctctcatttacgccagcatctcattgacgacccctcttgcagttgggtgttggaccccgtaaatctcttttcatctagaacagcctctctccccagtctcctttctccccccatgacactgatttgcagaggatacgggacccgttgctctatggaacagcccctttctgggtcaggcaggttgcttccttgtggtgtcatctattcccaagggcctctggacactggacattgagtgccaaggctgcgttcaaatccagtcatatggctttggtaggataccttcctactgcatcctggcagcaggactgtcccaccctatgtcccactgctaggttagattactctcttgcagccctcaaataatcacaggatggcattttgatatgtgatacccctttctctctcaagtctttaacctaatggtttagcatccattccaccttcagggattcagaacatcagcttatgtatcttggaccaatgttggctggcaggtcatcatggatgataagggactttggagcaatttaaatgccaggcaaatactgtggctgtccttctctatgctcctgggatcctgtgccctctccctctctcctgtggcgttgttggcacaaacaaactgtagtcacccattggaacatcaataaaagcttggagaccaacaaaatggaaatcccaggcagagaagcagagaaaccaggaagtagctggtgggggcgtgtgctgagaaaggaacaatcttttacccccctgtcctagtcctcctgtgttgctgtacaggaataccagaggctgggtaatttataaagagaaaaggttgctttagctcaggattttgctggctggaaagttcaagactgggcgtctgcatctagtgagagcctcaagctgcttccattcagggtgggagtctaaggggagctggtggcgcacggcatgtgcagagatcacgtggccagaggggacgcaagatgaggggaggagccaggctctttttaacaatcagctctcacagagcaaggactcactcacccctgagggagggcattaatctgttcatgagggactcacccccacgacccaaacaactcccatgaggccccacctccaacactggggatcaaattgcaacgtgacgtgtggagactcagatatccaacccacagcactgactgccatctggcattgagaactgctgtggagaagtcctgaggccgaggtgaattttgtccactttgtcaatttcatgttccctactcttagcctgaaactcaacttcctgctgtccctccagggtcccacgtggtgtcatcctctgcgcctgttccctaattttcagcaccacgaatgccaaatgcaggaccatctgagggccagggtatgtgctgtgctgttggctggctactctctttgccacttgcagcctccagctctctgcctgaatgtcaccccttcagagagcacccccactactgtaggtcccccttgattctgcactgccctcacctctcttctcttcattttgcaaagggaggtcgtacatgtgcatttggagtttccttaagaatcccgacctgagggaaggggattggcagtggagcttccaggaatggctggaaagttggggtcaggggacgctggccacatggggagagagctaagaaaagcagcaaaagaagaaaagaaaggaaagaaggaacgggctccctcgaaagcctggtcaggcgagcgccagtatggaagtgggcatggcacctcaattgcagagagtgtcctgggtttgaatggtgccccccaaaaagacatattgaagtctcaactcctggtatctgtgactgtgacctcatttggaaagggagactttgcagctgtaatcaaggtaagatgaggtcatactgtaggagcagggtgggccctaatccagtgattggcattcacaacagaccagggaaattgggacacagacacacacagagagaggatggccacacgaagacagaggccaagaaggattgctggaaaccaccagaagccgaaaatggcgagaaaggggcttcagtggagcgggggcctgccagcacctggatctcggacttctggcctccagaaccgggagagaaaaatgtgtcttgcttgaaggccccgatttgtagtacttattatggccgccccaggaagccatacagaaggtctgatggtgaggggcccttggtgaagctgcaggagtgagaacaccacaggtggccgctgtgcttatttcacaagaaaaactaagcagggtcttcaagcaggtcgcagattggctgctccaggctgccctgggctcacagggggctctttgcatttcccttagctcctctgcgccctggtgatggcagccattctcctgaccacgagacccaaggtgagtggtggcccctctccctggcctctccccctggcagcccccgtctgctgcctcctcatgcccaggcctctccagctgggctgagcttaggctgcccttagcatcgttttcctttcctgaggcgcacaatctgggcttcctgcctctgtcggctgtgctgcctgtttttctgtcttacaactcgtgcaacccgagtctttccacctgctgagccttccagggctccccccgccccccacattttgtttctgtcagctcctccaggggcccagggggttgaattcccctgtggccacaagaatgccttattttaggtgccagtatcttttgaggatgtgtccgtgtacttcacaaagacagaatggaagcttctggacctcagacaaaaggtcctctacaagcgggtgatgctggagaactatagccatttggtgtcactgggtaagtgatccctccacgacatacacacacccagtcccacctactctgtctctgggctcagtttatttccgagattcctgtttgtcggttgctatgagcccaagaataaatgcatttctccatcagaccagtaatgccagtaatccattgcaggccagccgccatctcagtaggatggtttttagctaagtggtctggacctgtaaatgttttaggtaaatgcgttggcctgtaagtttcagtaccagtcttatcttgtgtataaaatcgtggatcgactaaaggtctttctactcaaaagagagatgcaaattctactggaatatttatgtgcactcttttagacttaattcgtttctatgacggctgcattttgcatccgttccactttgtaaaatttagcaacatcttttccttccattgaccagggaggtcccacataaggacaaagtgtagacttggatttcaagccttgagaagtcccgggaggagctggggcagcttggagcacactgctctcccccttccatgccagtgcacacccactgccggaaggggcagcaattttgccaattaaagggcaaaagcaggagtcacaggctagacggatgggggccggagcactcaggaaggttttcaggtggggtaaagaacgtctgagggtgccagtgacttgcccccacctcacgcagctgatgagagatgcatgcgtgaaacagagtgggactgggcctctggcttttcccccagtgtgcccagcaaggctggctgctgcagctaagctcagacactccacttcccagtggaaatggaaacactccacttccccttgccgctggaggggaaatccagagggtcttcaacattgcactctactgcctttggggttgtgggagtctgactccacagattttgcctctgtaatctagccccatagagggaaagcagcttcatcccctggattccttctgacactcaccaggcagacctggggttccagggaggggtctgggatcctcagtggagttggatgatgaaacagggcaattcagctttcggggcctatggctgtcggcctcccaatagtccctggggcttgcaagcccttcttctgtccctcagggtgcccacacacatccccgatttctcatgagcttctcagcctccctgcaggccaggtgacaaacacagttgtcctcatggcccaaatcgccagctactgaagatctccgtgcccacctggccctggacgcgcaggagcccttgccctcgtagagggacttggccctttctctgagccttcccagtagtgctttttagagagttctttattctctgttacctgaagatattgagaattgcctgagttcaggagcgaccctgccctcagccatagtggtcttgacctgcttcatattccacgcccaggattttccttctccaagcctcacctgatctcccaattggaacgaggggaaggaccctgggtagcagacatccccagaacctgggccaccgcaggattgcacataggtgagtgagaggtgctcaaccagctccccatcggggtaaaaagaaatagcagtggcaaagggggcgggggagggtaccctgccgctttgggtgggaaatcctctttggaggcagatgtcaatctccaggtgtcacagcagccccgctatctccagcccatcctcccgccccttcatctctcctgtctgcctgtgtgatggctttctgttctgtggtcaccttgccccatccccctatgttctcacctcctgctcgttcatctctctgacttggcatgagggtgacactgcctggtgctctgtctttccaggtgacagaacacagagcaagacgtcgacttcaacgcagaagcattctggacgacaactccccggggccgatccacaaggtggcaaggaggggcaggcggcgaggtcgtctgtgctccagagaggtgcccagggcttggggcagagttcggctgcggggccgcagggccccaaaggcgcggagaagcggtacctgtgccagcagtgtgggaaggccttcagccgcagctccaacctcatcaagcaccgcatcatccacagtggcgagaagccttacgcgtgccccgagtgcggcaagctgtttcgccgcagcttcgcgctcctggagcaccagcgcatccacagcggcgagaagccctacgcctgccccgagtgcagcaagaccttcacgcgcagctccaacctcatcaagcaccaggtcatccacagcggcgagcggcccttcgcctgcggcgactgcggcaaactgttccgccgcagcttcgcgctcctggagcacgcgcgcgtgcacagcggcgagcggccctacgcgtgcccagagtgcggcaaggccttcagccgcagctccaacctcatcgagcaccagcgcacgcaccgcggcgagaagccctacgcctgcggccagtgcgccaaggccttcaagggcgtctcgcagctcatccaccaccagcgcagccacagcggcgagcggcccttcgcgtgccgcgagtgcggcaaggccttccgtggccgttcgggcctcagccagcaccggcgcgtgcacagcggtgagaagccctacgagtgcagcgactgcggcaaggccttcggccggcgcgccaacctattcaagcaccaggcagtgcacggcgccaggcgccctgcgaaggcggagacggcgcggaggctagcgggccctgggagcaccggccctgggagcgcggtggcggccaccagccccccgcggccgagcacagccgccaggccttccaggcccagccgccgctgactccccgccagcgcacccagggcgcggccggtctgcgtggggggccttcctggggacgtcgaggctcagcccccttcaggtgggaagaccgccctcccagggcctcgattgcggccacagccctgacctctttggccatcagaagaccccaggcagagcctcaccctgaggctgagaaacgcaggaaggactcagaaccgaggactgccgcctgccctggctcctccatcaacggcagtgcgggctgggaatggaggccctctactccctcctgagtcctgggccttgcaactgaggcacatagatggcacctgggccactcgtccctgagccacaggtactatcgagtgtgcacaggcgtgcgtggaggggatgcgtgaaccatccctcggatttgcatcagaatcgcctgctgcgggtagggaggaggccacgtgaggccagtgaggccagccagcgcggggcacgctggctttgagttacagaagagtggtgcatttcctccctgggggtcgttcccctcgccctaagagttgttagtgttcccaagtagaagatactgaaagcactttaatcctttaagcgcttatattgcaggtgggggaggcgctaaagttagcacagaggcaagaggctccctgaatgttggcataggatggggggctgtgccagaaaactcccgccttgtctgggtggccccagctgcttctgggaggaggagcagcgcccaggccccatcatccctgagcaccagtggttctgggaatggctagcccaggccctgcagagaggataagacccttcaagtcactcacaattggacatttgtagctagccaccctccaggctttgctttcccccctgcccgcccactgccttctgctccccagaccccaccagcaaaggccaccctggcctctctgtcccctgtccccctgccccgccccaccaccagtgcctaaagcttcgcacttacctgctcctccccatcaggcagcctctcttgcggctggtgacgattaggaggaaagccagacgggttaggaatttgcacttaggcaacagagcaagcccaggaacgaatctttcatcgaatgtcttttgcgtgacattttgtagaatactggacgttccgttgctttgattgtttttgtattcaggggtaatgtatattgaaaatagagattttgccatatcagagtatcagggattcactccctaaataagagtccccccagccctctgagaagacctcaggcaggagaaagggggccaccccaggcctgcccccagatgagtgtggtggcaagcctggcccctcttctccctacaacgatgcagtccacccctcttccccttagccctgcagaaacagggcagactcttcaaatggcactttactgaaagccaaggggaattctcaaggaaaagtctcagggctggcagaggcagctgctggcaggccttatcctagttccccagcgctgtccccagagctgggctcaggagctctgccccttggtgctctcagcccagcgtcctggtcagcggccacctccttccagccctgtcccctcccaggggagagggggtttttcatccacaaggcctgagggcaggtgggtggtaggcgtggtggaggggggaggttcaaagacagctggctcctatcaggagagtgtgggaagacccaaacatacaggattccctcggagaatgctgcttggagtgccagtcactaggacaactccagaaataatgttatacacacacacacacacacacacacacacacacacacacacgatatatatagttttatgaaaacttctagagttcttgtaagttgcacttataccgtagcctccttcagtgtgtccctattccccatcctgtgattgcgttcttgtctgcaagctggtctcataagcccacaagtgtgtgtcatgcctgtccccatgtccttgatgccaagcccggtgctggtaatcagtaagcatgagtgaaataggtcttgcagtcctagcacctcagactcaggcttgggaccattgtcggctccagccttgccttgaggcaatccgaagcatctacgactttgggttttccagaaaaagaagtattaggaatggtgtatttgaagtccctgatgaggccattgggaagtctgggtttttctgctgtgcagacagtctttgcaagggctggcatgggcccagaaatgcaatcctcgtgcagagtaggtgcctgtggcaggaggccatgcaattgggctctagtcttgcttcattcaactgaaccaggaaagaaacagatccacgcactctgatacccatttccgttgttctaggaggtaaatgatttcgttcctacaagccagacagtagccagctttcactaaagaagaatcgactccttagtatcttgtcatgccattggttctgatgcataagtgaaccctgtttttaacggaagctccttttttttcacctcaggacctacccaagactgtctagatactggcaggacaaggtacaggagttttcagcagaaagtggagttgccaggagagatgctgggcacttgcactgtgactttggagtgccgggaaaagttccagggtccccagtgcttacttagataaatggcatttaaaatagtgcagccttttatcattgcttagtctaatttagctccccataatgacattctcactgcaaggtggtcattgctatcattttcttttgggtgtggcagttaggtatgccacgtgagctgaacgggtttcacatggaatcaaagtcagaatgttcgaaaaggacatttgtgtttttccttcaatggtgccttgaaattgggctccctccctcttgctgtgtggggaactgggagggtatagcccaagcttgctttgtgatggacagctagaatgtaaaagcttaaactatggggaaagtcttgcctgttttccaaggcttcctccaccctgccaccgaagaacttacctggatgccaacctgggacccctttgtctttgggcttttgccctttgaaactgtgaatgcttcaagagccacataaatgctctggcagtgtctccatgtaactagtaaattgtcctggctggattcgttgtgaaatggaactgtcccatttactttggttgcaaataaggaagatgtatgagtattggcctggaaatgagccctctagtgtagagaggttattctgagggtttaaactacatggataggccttgggttcaaggttacaggaaaggctgtaagcctgagattgtggggaatggccagagctgggctttgggtgttccttgtgggggtccctgtgaaggtaagacagaaaggcattctgggtgagctgcctcgggtcagcccaggggtgcaggctcctctgactgggaccacaggcagccacccgaggccactcagatgccgtgactctgagaccagagggaagggaggctgggcctggtcccctgtgttcctcagcaaagtgccacatcagtctcctgagaacacagctgtgtgttctttccagtcgcttctgttcccagacttcaggcaacatggcagctcccatacttgccagggtagttggaagggcagctctggagacaggaagtggaggtagaagcaaaggaagggagtccttggctgggaagtgcttgggttcggacagacagggaagaagggaaagtatgaggtgtgttcagggaagcttagaagggcagagaggtttcagtaggacatgtatgggctaaagggtcagttagaaccagagtatggagagtctgggatgccatatacaaaagtttgggctctaacagtctcctgatgaggagcaattttccaaaacatgaaagaattattctaagaatgacaaagggaagttaatataaattatgactaccacagggtttgaatttacacactgaccaccacaaattttataactgtagtcgtctcgatggttgtgatgcccatgaggtgttgggctgggggcatgatgacgctgaggcaacatgagaggggacgtctttgacaccagggccccagccacgtgtctcaggggctcccacttgccatgggactcgcagctggttccatccgatgccagccccagtgcatctatcactgtcttcacaaaacgggggtcctccaggagttctggacagctgctctgcagattcttatatacctttaatcgaaggccttggacttttgagaggagcgcagtgccctccttttgtgttcaggaaggccaaattagagccttctccaccgccggggaatattcatgtgggaaatggaggcctgctgcagacctgaaggtcaatgattgtttaatctttctttgacagcattatgaaggtataatgggcatacaagaaactgcacgtctttaaagtgtacagttggagggtttttggcatgtgtggacacccatgaaacctcccccataatcaagacagtgaattgatccgccactcccaaaagtggccttgcgcctccagcaacccctctttcctgctcctcactgtcccccatccccaccgccactgcttggcttgctgtcactatagattaattcccattttctagaattccatagaaatggactcatacagtgtatgtctggcctctttcactcagcacaattcttttttcatcaggtgtttttgtgcatatcagtactccatttttttttattgttggtaggatcccattgtatgggtggaccacaatacctgttgaatacctgttgatggacatttgggttgttaccaggttttggccatgacaaataaagctgctgtgaacatttgtgtaccagtttctgcgtggacatatgttttcatttctcttggatatacggctaggagtggaattgttgggtcatgtggtaactctgtgttcaactgtgcgaggaactaccaagcttttccatagcagctgcaccatcttatgttcccaccagcagtgtacaagcgttttagtttctccatatgctcaccaaccaatatagtttggatctgtgatcccacccaaatctcatgttgaattgtaatctccaatgttggaggtggggcctggtgggaggttactggatcatgggggcagggttctcacgaatggtttagtaccatcctcttggtgttgtcctcatgatagtgattgagttctcccaagagatggtcctttaaaggcgtgtggcacctcccctttctctctcttgctcctgctctggcagcgtgatgtgcctgctcctgctttgcgttccaccatgagtaaaaacccctgaggcttccccagaagcagatgctgccatgcttcctgtacagcctgaaaaaccgtgagccaattaaacctcttttcttcataaattacccaatctcaggtatttcttcatagtaatgcaagaacagactaatacactaacacttgttattgtctgtcttttcattatagccatcccagtgggtgtggggtggtatttcattgtggttttgatttgcatttccctgataactaatgatgttgagcatcttttcatgtgtcctttggccattcatatgtcttctttgaggaagtatctgttcaagtcttttgcccgtttttaaatgaggttgtttgtcttcttcttaagttctaagagttctagacacaagtcctttgtcagatatgtattttgcaatatttttcttccaaactctggcttgcctttccatttgcataacactgcattttaaagagcagaagttgtgttatgttgatggagtctaaggtatggacttttaaattttatagtttgtgctttttgtgtcatagttaagaaatctttgcaaaactcaagtcactaagcctttatccagtgttttcttataaaaacatagacctgtttccttatagaagttgtataatcttagctcttatatttaggtctatgatccattttgtgtgtggtgtgaggcaaattcacaattcatttttttatatatggatatccagtttttctagcaccatttgttgaaaagagtatcttttctccagttgagttaccttagcccctttgtggaaaatcagttggccatatgtgtgtgagtctacttctggactcttcatggtacctcatcagtcagcactatgaactgaatatttgtgccccctgaaaattcatatgtggaagccctgatcccagtgggatggtgtattaatccattttcacgctgctaataaaggcatatcgagactgggtaacttataaagaaaaagaagtttaattgactcacagggccacgtggtgagggaggcctcacaatcatggtgggaggcaaggaggagcaaagtcacatcttacatggtggcaaggaagagagaacttgtgcaggggaactgcccattataaaaccatcagatcttgtgagacttactatcaggagaacagcacaggaaagacccgcccccatgattcaattacctcccactgggtctctcataggacacatggaaattttgggagccacaattcaagatgagatttgggtgggaacacagccaaaccatatcacatggcattaggagttggggcctctgggagcgcattaggtttagatgaggtcatgacggtgggaccctcatgatgggattggttcccaacaacaagaggaagagacactagagcttccttcctccactgtgtgtgaggatacagcaagaaggcagctgtgtccaagccaaagagaactattaccaagaaccaaatctgctggcaccttgactttagacttttagcctccagaactgtgagaaataaatgtctgttgtttaagccacccagtctgtggtattttgttatagcaccccaagcaaactgagacaatgtctatctcgatgccaatgccacactctcttgactactgtagctttgtaacacgtcttgaaatcaggtaatgtgagttctccaatgctgttcttcattttcaaaattgttttgtcttttcaaagtttgtcacactttcacatgagttttagaataccttgccaatttatatggggggaaaaagcctactggggttttgattggattgcattgaatctataaaccatttgagggaggattgatatctttaacaatattaagcctttcaatctatgaacatgatgtatctctccatgttgggagccttctttaatttctctcaacaatgggttgtagtttcaatgtttagaccttggatgtgggttgctagagaacctgctagagtggattaaataattagtagatccctacatgtggttattgagtttatgggtattgtttcaaccattcctagtaaccctgcattctcatttagttcttcatttatctaacagatatagactgaacatttaactgtgtgctgcgatatgaggatgagtatgacagaattaggtgtatttttttgttcctatgatgtttttgtttagcccagtccatatttgacagcagccttgaccataatataacacagagctattttccgtttctttgtccgtttgtttgtttctttgtgtttgtttgttttggaaacagagtctcgctctatccctcaggctggagtgcagtggtgtgatcttggctcactgcaacctccacctcctgggttcaagcgattctcatgcctcagcctcctgagtagctgggattacaggtgcctgccaccacatccagctaatttttgtatttttagtagagacagtgatttgccatgttggccaggctggtctcgaactcctggcctcaggtgatctgcccaccttagcttcccagagtgctgggattaaagaagtgagccaccacgcctggccagaggtttttttgtttgtttgtttgtctgtcttgttttgttttgtttttgtttttgacagagtctagctttgtcaccaggctggagtacagtgatgcaatctcggctcactgcaacctccacctcccaggttcaagcaattctcctgcctcagcctcccaagtagctgggattacaggcacgcactgccatgcccagctaatttttgtatttttttttttttagtagagatggcgtttcaccatgttagccaggatggtctcgatctcctgaccttgtgatctgcccacctcagcctcccaaagtgctgggattacaggcgtgagccaccatgcccagcccagagttgtgttttatattatgtgtgtccgtgtgtccaagattttttagctgtgtccaatttttttttttttttttttttttttttttgtgagatagagtcttgctctgttgcctagactggagtgcagtggtttagtcatggctcactgcagtcttgccctcttggcctcaagcgatcctcctgcctccaccttcacctcctaagtagctgggactacaggcatgtgccaccacatctggctaattttttttttttagatgagtctcgctctgtcacccaggctggagtgcagtggcgtgatcttggctcattgcaacctccacctcttgggttcaagcaattctcctgcctcagcctcccgtgtagctgggactacaggtgcctgccaccacacccggctaattttgtatttttagtagagacgggatttcaccatattgatcaggctggtctcaaactcccaacctgatgtgatccacctgcctcagcctcccaaagttctgggattacaggcgtgagccacctcgtccagccacctggctgattttttaattttttttttatagagatgaggtctcattatgttgcccaggctccaagattttttaagtaccattttctgaaaagggcttctgacagaacctcaccaagaaccagatctgctggcaccctgacgttagacttttagcctccagaactgtgagagctcaaatcaaatcaaatcaaaataagaaagtaagaattaaatttttttcatttttttcaatgaaaatattcctcgcctactatataatgtattctagctggttacatgagaacaaggtgagaggaggtagagaaggacaaaggaggaaagaggaaagcacaggtgagaaggagagcagcttgactgcagtgactgaacactcagatcacagggtctcctctggttatgggaatgggatgcaggaagaaacaaacacagtatatcagttaggaaagtggccacaaaagtagtagaaaacctaactatggtggattaaagaattagatgctttgttttctcacctaaggactctggggtagctttctggcatcggttcagcagcagagcttttggcagtacgcagcatctttctgatttgcttcgctttgctgcgtgatcacaaaatggctgctgaagctccagccatcacatatgcattagacagaaggaggaaggggcagagacagacactctgtcctcttttatcaaggaagcaacagttttcccagaaacttgcctggcagacttccacttagatctcaggagccagaactggatcatgcggccacccctaacctcaagagaggctgagaacgttgggaatgggatggattttcatgacctatcacctggggctgagcccactgatgccttgaacaaagttggggtcttatccccagagaaaaaggttaggatgcagattgggtggtgttatgagtcaaattgtatcccccaaaaaggtaggttgaagtcctaacccccagtacctcagaatgtgatcatgtttggaagtagggtcgttgccgatgtaaatatttaaaataaggtcataccggagtagggcgcacccttaatccaatatggctgctgtccttacaaagagaggagaatgccatgcaaaggaacagacacacagggagaaggccatgtgaagacagagacagggatagaagtgatgaggccacaagccaaggaacacccggggccaccagaagctggaagaggcagaaggaccctcccctagagcctctggagggagcgcagccctgcccacacctagatatcaacccgagggccctcagctctttatgcctgaactctgggaggctgggggtgagggagagaaggccagccttgctcaagcccctcccactggccggcatcctgactaccatttacagatgtgaaaactgaggcttagagatgggaaggaattgtctggagactcaacactaggaagcggcgacagattcatgcccaagttccaggactccagcattgctgctcactccagccaatcagggagagcagctgtgtgaactctgcccccaaactaaagggaatccagtcgcctttaccattttcctaacttcgcccatttggggggatgattccataagttggccataaccaaacataaaaatcatttgattttctggaaaagattgtacaaaaggaaagaagccaaaggttaaatcctgccttggaattgggaaagcgtttggtcatccccctccccgcccttgcaccatataggttctcagctggtgagaccctcaggagcgctggggctgtgggccctggagccctgccacctgcactttcttccatcccttacccacaattgctcactccggatgccatgcaccttcgtttcctttctgtaagactgagggggccaggtgtggtggctcacatctgtaatcccagcactttgggaggctgaggcgggtgaattgcctgaggtcaggagttcgagaccagcctggccaacatggtgaaaccccatctctactaaaaatgcaaaaattagccaggtgtggtggcgcatgcctgtagtcccagctacttgggaagctgaggcaggagaatcgcttgaacccaggagacggaggtttcagtgagccaagatcacgccactgcactccagcctgggcgacacagcaagactccatcaaaaaaaagaaaaaaaggagagagggagagaaaaagagaggaaggaagggagagagggagggagagagggagggagggagggagggagggaaggaaggaaggaaggaaggaaggaaggaaggaaggaaggaaggaaggaaggaaggaaggaaaaagcaccacaaaccaggtggcttaaaacaccagaaatttactctcttattgttgaagagccagaagacccctcccttgccttttccagccgctggtggccccggacttccctgggttgtggctgcatcgctgcaatcccggcctcagtcttcaagtggcctcgtcctcccactgtgtgcctccactctgcgtctctcctaaggacacttgtcaatggatttagggcacactccagtaatccaggatgaccctgtctcaagatctttaatgtaattacatctgcaaagaccctttctccaaataaggtcacactaaaagggggcagagattaggacatgaacacatcttttgggggctgccttcaacccagcacaggcaggaacaggcttggtgtgtttgaggcctgtgtggctggaggccagtgggcctcccaggggcagtggggagggatgagggtggcagggccagggacagccatatagggctcggagggcatgacaagaagtgcaagggctcagacataacaggagctgtcaccgtagctgacatgcactgcacatgtgctatgtgccaggccccaggcatgacccaccctcccaggatcattgtattgtttccattttacagatgaggaaactgaggccaggctgtgaggtcatttctgccagccacagggttgggcagctggggggtgaggcctggcacccaggctgtcaccactagctgaggccccctcccaacggcttgggtgcctttcagccctggacctcgagggagggaaccacaaacgccaagtcctcctctccgccccaggggacctgggaaatgccaagggttcttttgccgggcttccgggttccctggcaggagggggaatgctgtacgtgctggatttccaggttggaaggagactttgtaaaccttttcaatacagccccgccaggcttacggcccagggaggtgtgtctgcaggacccggacacatctctttgaaatgcaaacataaagctagcgcccctagctccctgccttcctgagaccaccaagagaaagctttcattttcctttggatacaggcaactcactagcgcagaatggccagctgctgaccaggtgcactcacgatggatgaggacatgcagcagggcatcttgagatggcatctgcctgactagatcaaagggtagctgacatgcactgcgcaaaggatgaggtttccttctcggcctgtgatgcccattgcagctgagctcacctttgtcttctttcccgcattgtggagagggctccccgggctggcaggacctccagtcttcccagtacatgcaggggtggagcgcccagggtggggagcagggtccagaggtgggaggggctgagcggaggccatggatccggggcccggggcgaggatcagcctccagctacccggaatgcgctgggcccctggaggtacctgggtgactgacaacccaggagcctggggcttccgctgggactgtggcgactatcacacctcacgccacttaaggggttgtcgctgcttctacaaatccagctagaaacaagaagatggaaattgggaggatgctggccagaagacaagaagtgaggagcaggggcagaggacagacgggtcagcccttgactgaagaaggcctcccagaggaggcaaaggcccgtctccacctcaggagggctagctgagctccactccaaaccggattgtcatggacctgggctttgcctgacaaacattcccaagctcccaagacagcaggagcatctcagaagcttccaaacagaaagaaccagcaatagcagaaatggatcagagtgggccagcttccctgtgcgactctggcagcctgtggatcctcatcctcacccagcagggaaggaaagcaagaatccttgtgaccaagcaggttagcttcaaaatgcattttgatactcgggaggctgaggcaggagaatggcgtgaacccgggaggcggagcttgcagtgagcagaaatcgcaccactgcactccagcctgggcgactgagcgagactctgtctcaaaaaaacaaaaaacaaatgcattttgaaacttcgtctttcctttcttgctttcagccttaatgtactttgaaactccttgtttccctcccttcccaccagacactcccttgcactgctcactcacctaattttgtgcttacttagtagttccagggcgctaatcttgagacaaaccaagcatggaaatctagctgtgaaattccaggcggtcagtctacaacccagccatcgtagagatgatgccagcccgtgctcccagtggaccatgactcaagatagccaagggaacaaggcacacagaccttgtgcccagtgccccgcctgcatgtctcccattccaagctcccttttactcctctcgcccacataaagcttgagatggttcctctgaggcttgagcctggccagcccggccattctcccacctgctagcactcgagtaaaagctgctttcggccaggagtggtggctcacgcctgtaatcacagcactttgggaggccaagttgggtggatcatttgaggtcaggagtttgaggccagcctatccaacatggcgaaaccctgtctctacaaaaaatacaaaaattagccaggcatggtagtgcgagcctatgatcccagctactcaggaggctgaggaaggagaatcacctgaacccaggaggcggaggttgcagtgagccgagattgtgctactgcactccagcctgagtgacagaacaagattctgccaaaaaaaaacaaaaaacaaaaacggctttcctttcaccacacctcgcttcttgtattctggcctccaaacagcaagcagccagacttgagtcggttacattctgcaaacatctgctcactgcaaagctgcaagaccaaacaacccctgcaacagaacagaggcctcagagaggaaggggcggtgggcagccacctcacaaagtatgcgctcaattgaaataagtgatgacagaggggctggctgggctggctgtaaggatcaagtacagattcgtgggtgttacgcacgaagaaaattccagagaacaaagaccagaccgtgctatagtgactgggaaggtaaagtttatgcatcaacctggccagtctacagtacccagttttggtcaaacaccagtctagatgtggctgtgagggtgtttttaaataaaattagtatttaaatgagaagactaagtacagcagattgttctccatgctgtgggtgggcctcatccaatcagttgaagggattaagagaaaatgactgaggtcacccaaagaggaaggaattctgcctccaactcgagcctttggactcaaacaactcttccctgagtgtccagtgacttgccaacctccatgtcacgtgagctgattccttaaaatctctctctctctacacacacacaaacacacacacacgatatgatatatatcatatacatggtgtggatataatgtgtatttttggtgtggttttttgggattttttttttcttttttgagaccgagccttgctctgttggccaggctcaccaccacacccggctaatttttgttgcatttagtagagacagggtttcaccatgttgaccaggctggtctcgaactcctagcctcaaatgttctgcctgcctcagcctcccaaagtgctgggattacaggcatgaaccacagtgcctggctataatatgtatcaagtatttgtcagtatatatgtgtcatgagtatatgtgtgttagagcgtgtgtatatatatatgtgtgtgtattaatacagttgtaatgcagtaagcacaaacacacagcaactaaatgcataaagaaaaatgactagacatgaaggaagacttcaagaaaatgcaattacaatggaatgttctaatatattgtcattaaatcagacagatatagtcaacaaaaaaaaaaacaagtaaaaatgtaaaggaaattgaatagtacaattgtcaactagattttagagatatatagaaaagcctgcatctctgaagcaggtgcatttttcagagtctataacatattttacagttatttatgtattcggcctctgttatccattgaattgtgtctgcctccctcctccccctaaaaaaagatatattacagcccaaacccccagtacctcagaatggagccttatttggggatcttcacagaggtaatcaagttaaaatgaggtcattagggtgggctgtaatccaatatgactgtgtcattataaaaagaagaaatgtggacacagcgccttgtatgcagggagaaagagggctgtgtgaagatgaaggcagagattggggagaggctgccacaaatcaaggaacaccaaagatggccagcaaagtcccggaagctgggggagagcctggaatagattctccctcacggcccccagggggaaccttgccctgccaacacctcgatctctgacttctggcctccagatccgagaaacagtccatttctgctgtcgaagccccctagtttatggaactttgctatggcatccctagagaactcaagcagcccccaaactaccttaattcgaaaaggtgatattttaagcaacacatcctcagattattatccaatacaactaaaatacacaacaaaacatgactggctgggtgtggtagctcatgcctgtaatcccagccctttgggaggccgaggagggttgatcacttgagctcaggagttcgagaccagagggaaacatggcaaaaccccatctatacaataaatacaaaaattggcaggctgtggtggcgcatgcctgtagtcccagctatttgggagaatgaggtggaaagatagtttgagcccgggaggcggaagttgcagtgagccaagattgcgacagtgcattccaacctgggtgacaatgagaccctgtctcaaaaaaaaaaaaaaaaaaaaaagatcatgaaatcataattactcagaaattaagataaactgcagtatataagcatgagatcaagaagggaatggaaagcaaaattacaagctattcctaaagcaaagcaaagaagaatgtttaatagcaaacctataggacacagtaaaatctgcatttagcgataataaagtgtcaagcttattgatagatacaatttcaacaccaaacgcatcactggccataatgtttagggtacagattgaatacacactttaatttaaaatacccgaatcactcaaaagatactaataaatcaaagttttaaaagattcagctgggcatggtggctcacacctgtaatcccagcattttgggaggccaaagcgggcagatcacctgaggtcaggagttcgagaccggcctggctaacatggcaaaaccctgtctctactaaatatacaaaaattagctgggcatggtggcatgcgcctgtaatcccagttactcgggaggctgaggcaagagaatcgcttgaacccaggaggcggaggttgtggtgagccaagatcgtgccattgcattccagcctgggtgaccagagcgaaacttcatctcaaaaaaaaaaaaaaaaagattggacacttccctttaaacatataattacctctaaaaactatctgtagctttggaatatgaaagtatgaaattgtattcacccagccaatactatgcccacatatactgctgctccctattgaaataggaacgtagtcagtgggtgatatttgtaattttaaaagttcgacacatggaaaacaatttggctcttctaatgggcatagagagcagctctcttcgtcaccacgcagagatctgccaggctgatggacaactggatacccccagaggatatattttgaatgaccttatccagtgacccatgggtgtcatttaacgcatgaggctccctggagcaggaactgacatacctgcttccagagcttttcagccctgaacgtgcactgcaaacgcgtaagagtggtactagcaccattgtgagagctccctcaagtgtcagccaatgcaaattcagaccaccaggagaacatcagatccttttagaaaaaccatggagaaactgcgtttctcttacaagttagttcccatatcaagaagaatgccacagggtgtgtctgtaaagtaaaaaacccacactcactgccagctgccgtcacctcaggttcttgttcttcctcggcatcttcatcgtcttcctcttcagcctccagatacccctcttcccagcctccctcagcctggtcttccatttctgcctcttcagtgatgggccaggtaaatgaagctcctgaggatcaacatctgtacactcttgactttctgaaatcttaaagaaattatcagaaactgtattaaatttatttttcaaaagttttcaaaacttcataaaaccttaacttatctatcatggaagatattgctgatatcaataataacacaccaattttactccaaaaacccaaaagatatactggataaattttaaagattagaaaaaatgtccatgcacaaaataaatacacagacacacatatgctgtcttcctcagtattttgattgaaatgccgtgctgtaaatggattcatgtctatgctgcaacttaaaataatttatgttcagcatgataccaagtataaaaggcaattaaagaacatgattttgattccaaaaaaatctacatttagagggaaattgcagccttcgagtgccttatgccaaatcacaagtgagtgtgtgggagtggcatgtgtgtgtcaggggagtgtgtgtggcacaagtgtaaatgtgtgtgtgtgcatgtataggttgtgggggtgggggtatgtgatgtatgagtggggggtgcatgtgtatgtggtgggggagtggggacttgcatgtgtacccccaaaattcatgttaaaactgaatcaacaaggtgacagtagtaggaggtggggcatttagaaggtgagtaggtcatgagggctgcaccaccatgaatgagattagtgcccttacaggagaccctgtgaggcagctagtcctttccacaattcgaggaaccagccctcgccagactctgaacctgctggtgccttgatcgtggccttcccagactagagaactgtgagcaataactgtttgctgtttataagccacccagtctaaagtatttttgttatagcagcccatagggactaagacaaaatgcaagtaatactccccaggttcttgtcccagctgaatcccttagaagaggttgatgctcaagagacattaaatggcaaatacaagtctagaatggattggcacagtgtgtacaagtgtgtgcgagagtgagtgtatgtgcaagtgtttgtgcatgtgtgtggttgtgtgtgcaactgtgtacaggtgtgtgtgagtgctagtgtgtgcgagcgtgtgtgggtgtactgtgtgtaaatatgtgtgcaggtgtgtgcatgtgtgtgtgcaagtgtgggggtgtgctcgggtgtgtgagtgcttgagtatatgtgagggtgtgtgcacaagtgtgtctgtgtgcatgcaagtgtgtgagtgtacacatctgtgagtgggaggtgtgtgttcacaagctgagctataggaagcagtgtccccacaatgctgatactgttcctggaggtcccctacatgaaacctccgcagctgacactcatcaatgctgcttaacttctttgcaacaggcagggggcagatatcatttacaagaaatgcagacgtcccgctgtggtcccgtggcactccccaaccttctgctgcggctttcagcgtgctccccacattgtcttccgcacaaagacaaactggaaatgttatggcctttgattttagtattcatccctctccatagtgaattccattttcaataggcttatgtcacatgtcccccaggtacactcccgtgatcaccgctgtctccccactggcagacacccctggtggcctgacggggctcatcagtcagtgatgcagcttgatgaggggcaggcagctggccaggggcgagctggagcagtggagtcggttcgctgttggctccacagcatcaccttgagtcccatgcaaatgagcttgcacattgggagctcacttcttcctgctgagtagtattccgtggtgtggacgcactgcggcgtgtccaaccactcacctgatgatgaacatttgggctgtttcctgtttggggctattatgaaaaagctgctgtgaacgttggagtatgagtgtttgtatggttacatcaatccctttgtcttgggtaagtatctaggaggggaattgttggctgatgtggtaggtgcatgtttaacattttcggacactgccgaagtgttttcccaagtggctgccccattttcccttcccaccagaaaggcacgggcacccccggtgctccacatctcctccctggtaaaccaacacttggtgtggtcagtggtttttgttttacccattctaatagatgttaaacgtccaggaattttgagagctaaacaaacactatcattattaaaaagttaaattatgtaaactgacaaattatatgaaaaataaaggagatactcaaaactcacgtcttcattattcgagcatgctttactgttgctgtgtgttgacacctgtcagatgtgtgtggtggaaatcctggaatctcttcccaaggtcaccttcagtgacttcctgttggtagcttaagactggccaagtggaagtattataccgcagagctcggcatgccacggcatgccagggcttgatgtattactgctttgttgattgcctagactttagaaagaggtgaagaaaatgctaatattgcagattaaactgaagaatgctgggtctgcggccattacattataaatagcaaaaaaataaataaaaataaacattttcggtatttgaaaactatcatccaattaagcaaagaagttgctcatctttgctgcttcatgtttatcttactcattaaaataaatgaaaacatcagccaacatgtatgtgggaagcacagctgtccatccatcgcactcaagtacagggtacagataacaagaactcagtaaaagtcaatgaaggtattttgtgagtattcattggccatgtggaatttacggcgaagagtatattgtgtattttgttgcatattttatatatattgtggattttattatttgtaaattgtgtgttcatgtatatgtatgcatgtgcctgtgtgtatagcctgtgtgtatatagagaaagagacaggggaggaagggagagagatccatgcctacatacatacgtgtacatttcctttcctggaaagctggttgttaaccatttataagcacattgctgctttgaggcatcagagaggcaggtcacagcctgtctgggcagcatggtacgcaagacgcctggcctggccagtctcgacatggactcggggagggcgcccgaggccaggccaccgtgaggccaggggagcccagagtgatgagagagaggcacctcagcccaagacaggtgagagggcccaaaaccagagacccctccacagaggcggcagcagccaaaatcaggctgtcacctgcctgtctgtcccatcctggggttgagacccttctagcatgcccaatgagaagggccccacttggtgtcacctacccagcaggtcagtggcaagaccaggttttttttcttgtttttggatttggaaggggggtctcactgtcgcccaggctggagtacagtggtgccatcatggctcactgcagcctcactttcccaggctcaagtgatcctctggccctcagcctcctgagtagctgggactacagatgtgtgcctccactcctaatttttctttttaatttttgtagagatagggtcttgctatgttgccccggtcagtctcaaactcctgggctccagcaatccgcctgccttggcctcccaaagtgctgggattataggcgtaagccaccatgcccaaccaaggccagggttttaagggtaacacctgctggattcggctgcccagctggagcctggccagtaagataaacagaagcaggccctgtctgggcaccaggggatctgggggctcagtgtcccctactccagcttctgtagggccagcccagggcttgtgacactctcccaggtgatgctctcctcgggaagcttggctgtgacaagatcttctggttactaaccacattcccaaactaggtcctgtggggcttccccagaccgtgccccctcccctcccctgctgccactgtccttggccaggcccatagctctccctccctccaccaaagccctccatgctctgcttctgcccgccttgccgtcgctgtcctctccagcccattctccatgcagcagcctgatgtggtttggacgttcgtcccctccaaatctcagtttgagatgtaacccccaatgttggaggtggggccttggtgggaggcgtttgggtcatggggttggatccctcatgaatggcttggtgccgtcctcacctccgcaaggagttgaattctcgctgtgagttcacctccccgcctctctcttgctccccctttgccttctgccataagtggaagcttcctgaggccccaccagttaacagatgccagcactgctgagccaaaataaacccgctgtctttgtaaatgacccagcctcaagtatttcttcacagcaactcgagaacagctcggcacgcagcccaagcagcatatggcagaagcctacaccagacttttcccctctcctgctcatgaccctccgcggctccccgctgccatcagggtcaggcctggcccgggccacaaggaaggtctgaggtggtcactgcctgtgctctggcctcaccatcctaccaccgtgcacgctgcagtggctccagtcattctgacctacttagggcttcccagattgtccagctggctggaggctcaggctttgctcatgtgagtcactctcaggcgtggccaccccatcccttcttacctgacccagcgttggtgacaggtctctccccacccatgaggcctcccaagactggaagtgcctcagggtggggcccctgaggcaggttagcagggaacccaaagcacagtgcggtggccagaagctgccctcccaccgagcggcctcctggccctacggggacacgggctgcaggataggctcccttccagggtcaccctcacagcaccagccaccccacctctgctccgtgcaccgtcagggcccttagcatgtacatgtacatgtgcatgcccacatgtgggggcacctcccttttccccagcaccccgtttcttaacatttcaccctgttaccacttcacagagcagggacagagactccaggtcccacggcgggcaagcgctgcagctgagctttgtgcccaggcaggcggccggctctgtgggcttaaggccctactcatggcttctttgggcctctggggtgacaatgcagatgggcggcaatcagcccacagccacaacccatcagccctcagaccaacccaagagcttgacgtctccctacccagccacccacggtcctcaccgcgaggagaggccataggggggcggccctggaggtcttgtgctggcccctggcatggctcaccgcctggccctgctcagcagggggtcgagggagtccagcccctagtatctggccagctagtcggagggtgagtagttggcaatgtttattgggaaacagcaaactctgctgggcacccaggccagccgggagagcacggccctggaagcggggcctggagaggaatccagggccgtatggctggtcaggcagccagggaaggcctggcaggtgcacggacctgaggctgcccagataggaggagccgggggtggtagaggccagctgaacggtggaggctggcactgtccatggcacaggaggtggccctggtgctcaggcctccaggctggggtcatcaggcggcaagtacatgggctcgatgtgggcccacccacgggcctgctcatcggcccaggcgagcagctctgcggcgcggtgcaggaagatcaggagcagggtgtgcacgtcgccctcggctgagtgggctgcgcttggctctgcccggaagtagcggtggaagaggctgccgaggctgtaaccctggcggccccgggcccgggtgccgtggctgtgggcgcggtccaggccccgcagggccggcagcgtgtccaggcagacagtgtcccggggcaggcgggcacccaggcgccgcagctcggcacacagcagggggaaatcataatcaaagccattgtgggccacaaggcagatgggccctgcctggcggctcaggaaggcctgcagcgtccgcaccacggcgccatcaaagccagccttccggcatcgcgccaggccctcactgctcaggccggtgatctcgctggccttggcagtgaaggggcgctccgggcacatgcacagcgtgagcttgtccaggacccggggcaatactagggcaccagactcgtcgtgctccgggttctccagggaggagcggtggacagcaaagagggacagctcggcaatctcgggctccacactggggagcccagtggcttccaggtccaggaagacaaaggtctcggcccggggtgcctcggacatggtgatgttcccacggggatagcaagtcctcaaactgtccgagcgagaggcacaaaccctgaggactggagagaggggttcgcccgggccctgctgtgtaccatcctccccctagccaaagctctgacccttctggggctcacttcctgccacccccgaccacagcacctgtgacctttggctctgggagcgtcagccccactcctgtcacctactgaacagaaaaggcaggcctcagagcgctctactgcctgcctccagccacagtccccagcagggattgggagaggcagaggcagctcagggaccgcaccttggcggggtccagccccttcaccggaatgccttggctgggaacctggggcatagcacactgggtctccagccctggaaccagctgccgggaagcaggcaagcagccacccgaaagagcccatgcagtgcacccagctcccgctgggctcgacctccccacccttgtccctggcacacaggtgctggtcccgagctggcctctgcctgcttgcccccaggctcccggggagactgtccttgccaaccccaccacaccagcttacctggggcgggcactgaccggcttcctgggcttctgggcacctgtcgccacacaggctgctctaggcggcctttaatcagcggccgcagcccgcccccagctgcctgttggccaacaatgaggcctggggcctcaggacctgcgcagccggctcgctcgccaccccctcgctagctcacagccactgagacacacgccccgtgtttacaaattaggaagcaggccccgagctcttcacaggcacggggaggaagccagagtggtgcggaaggcagtaacctccacctagccaggctgtggctgccaggcctggcaggcctggggtcaatgcctcccccatgctggggccaatgcctcccccatgctggggccagttacacaaaggcaacaggtcctctttgccaggcctcagtctccccgtcactggagatcaggtgccgctcgtggggatgaagcgagctctggagtgtgaccaaggtgcccacacatgccgtgctcagcctccaaaggggaaggggtgctcccccaaaacctagggatggggcagcctcgggagatgctatctgctttaaggacgtcgcttcatcatgtctaccgtgcacctaacagtggctgctggggaaggaagggaggtgggcctggcccgggagctgtgcaggccgcagctgagctaatgcttcctccaccacagataagcaacgttagggggtgggccaggagcgccgggactacaggaggagtgaagcccagcccctcggaccccaggctcagggacctgccctgtctatcccgctccaggcaaagggcaccaggtccttcccggtcctgcgagcagtggcgccctgaagacctcattctggagcaagagacaacagcccttgatggtgggtgcactgcagggccagccccatgctgggggcacagagaggtgaccaagaggagtcccttggcctataaatcaggtggtgcacctgcaccatggtgaccacaggcctgcccggcctcccacctctcacagtggtggctgggggatgcctcaggcgactgggatggaggggggtctggcacctggctcctcctggcctccttgccttgtgtgcccacagggaccttggggaagcaaaggagatggtgccaggagggagcagggtggggcgggcagcagcaggtacaatggccccaaggaggcagaggccctaccagtcacgcctgttccggtactcacagggagggaggcagctgtgacaggcacactgctcagggagatactgggtcaccctgggaagcccagacagcatcttcctggacaaccagtcaggctgaattccccagcccagagctgagcgcccagccagggaggagcaggaaactggtaccccgcgggggatccaggggcactcaaggagggcggctgaggggtgcgtctcgcacaggaccctaaggccagccgggggaggcgacagtgggttctctgctttcaagtggctggcagcagcagggaggagtggagccacaggaagaggacgcagcccaggcccgccaagatgacaggagggccgccgccagcctgcccagacctgggccacctgagcagctcaggacaaggggaaggagagagacatagagctgaggaagcagaaagcaggctggaggcaactgcttagaaaccaaggctttctttgtgtccaagtcaaaccgcccgtctgtctctccctccccaaaggggccaaaggtccctgcctagagcacaacgtggggctgcaacggcttctgctgccacaatcatccatcctcggccaactcgatcttgggagagggcttcctgcccgccccatcctgtgctttggcgtaggccatcactgaagactttctatttctccattagttcattcatcttggtagctgcagaggaaagaaaagaaaccaaaaggatggtgggagtgtaaactagttccaccattgtggaagtcagtgtggcgattcctcagggatctagaactagaaataccatttgacccagccatcccattactgggtatatacccaaaggactataaatcatgctgctatacagacacatgcacacgtatgtttattgcagcactattcacaatagcaaagacttggaaccaacccaaatgtccaacactgatagactggattaagaaaatatggcacatatacaccatggaatactacgcggcccataaaaaaagatgagttcatgtcctttgtagggacatggatgaagctggaaaccatcattctcagcaaactatcgcaaggacaaaaaaccaaacaccgcatgttctcactcataggtgggaactgaacaatgagaacacttggacacaggaaggggaacatcacacactggggcctgttgtggggtggggggagggaggagggatagcattaggagatatacctaatgtaaatgacgagttaatgggtgcagcacaccaacgtggcacatgtatacatatgtaactaacctgcacgttgtgcacatgtaccctagaacttaaagtataataaaaatatatatatataaaataaataaataaaataaacaaataaataaatagaaaagaaaccaacaggaaagcgagcctggcgcaagaggcgaggtgcctcctgcccaccactcaaggcacatgtcctcagctgatcctccttgagccccaggcaccaccaggatggcagggaagggacaggcactgccgagctgggagctgctcaggctctgtggggaccaggccagcagcttgggagccctgggctgggtcacaccgaccgcagcacagttccgagacccaggccagggtctgttgacccggctgtgcccccgcccacctgccccctgccccccaagccccaggggcagcacatggcacacagtgaggaggcaggggctgtcctgacttcagtggcacgttcagtattaaccagatggagaacactgcacacacaataaacccaatcacacagacagccctaagccttggctgcccggcccagtggcgaccgtggtggctgcgctgaccttatctgccatgaccacatctgcctctcagttgccaaccctagaccatggccatcatccccctcccccagcagacagaggaggacacagcccctcacctgccctgcctgtccgctccccatccgtggccccactgtcagctagactttgccttttacatgttgaagtcattagcattgacattaagtgctgtgaaccctgaatctgtcatcctctgcccatcccgagggtgactctgaagctcaggaatcctggggtgtgcctcggggtgacaccgagctggggaatgtgctcagcccgcctggaattgcgccccaggaccctctccactcgccatcagcttccagtggcatcccagcagaggggcttcctgccgcaatgcgcactgctctagactgtcttcctaggctccggactgtgtccctcgtgtggcatctgcccttatcaaatcgtctagacctccatcccggccttcctgctctgccctcactcttggtgcagggcttggcagggtccagagcccaaggccgggtgtgcagggccctcagtgcttgtaaggcatcctggctgctcctctgaggccacaggctgtctctcttgaagctttggccccagcccttggcccctgtactccagatggcaggaggtgggttccatctaccctgtgctcggcgcctgcactcacctggcttgtactgtgtgcccacctcctccggagccctgcccttcatctcccctgtcccctgccctggagaccctgtgcctggctggggcctgtgtgatgctgatctttgtgctggtttttctctctgttttctctcttcttagagatcccagcctcacttcgtttctagtctctttgtggctgggttttcacagctgtccaagcatgtctggatgtcgcactgagtgtattcagtggtgtcggaaagtccttcaggtcagatttcctgctcatccagggcttccttctctcctgcatggggctgcttttcgagccacaggggctgggaagaggatctgggtagctgccactgcccctggtctgctgtggtggagccgttgcctgtggggtctctctctggaggacagtttggaggagttccatggaggcgaggcagggatcagctcttgccccatggaccctcagaggctgcaaaaaggtaggtttcacccgggctgccgccagccacatcagccacatcaagagacgagctgggagccgctcaggctctgtgtgagccgggccaccagcttgggagctggtttgcttattcatttccatcactttcttcacagaagaacaggctagggtctcgccggggaggtgggcctctccagacctgcttcacctgtgccctctgcttccatctgctcaccactgccctgtccctggcaccccgctgccccttgggctgtcctctaggctgccaccttccccgcccgctgagcccgtcaccactgccggggttggtggcatctctccactgttggtaccctcaactctcctgtcccattcttgcactgacagcattgcttcggtttctaaatacattgatgttttcatggcagtgaggtttcaggaagcctggggggcgactcctggtgtgtggtgctgatccacagtgccaaggccctcccaactcacatgaggccatgcccccagcaagagcccagaaggcacactggctgctcctcacttcataggtggtgccgcacctccaacagagcctggctgcgggcatgcagatcgctgggaggtgaaacagcacagaaacacggccttccacagcgggaggagggccatcgagaccacggccctcaaggggtcagatgggaaacgggacaaataaagaactgtcccgagtggcctttggcgtggatttgatgctgaccctttctctggtgtgtccagacactaagaattcatctcaagccacatcaggatgctgaactgatgggagctgagttgagagcccctagagaggccgatgcccgccgtaggcctgctcccctggcgtctctccagacccccaaagtggccggggctcaagggtgaagagacacttccctgtacacaacgcactgcccagttcacacggcctggatgtaaagggtgcctttctggtaagaacagatactacacttgatcttagccaagaagcgataaggggcctttctgaaaggcaagacctgccaccagtcctatggtgccacagtcacaggtgagatggcacactgttgcgaataccaatgatcattataagaatgatggcatagattataagcagtttactaacagcaattataaaaactgggaagagagtcatagtgactggtgattaggataaacgctataatacattttaaagtggagggttctgctgcagttcaattggcaagaagaggctcctcagtgcctggtatacatggggtagttatgtgccgaggccaagagcagtgagaagcctggctctccgaggagacggctggctggagggttcatccaaagacagtctccaaaactagggctcagaggctatggacctgaaaccactacttgggggtgcaacagtggaaaacatttacagcaaatgctttagctgctgctgcctgaggcagtgcataatagccggggcaaacaagagactaaacaagaagctcaggagaggctggaaaatcagatgtccacaaaggctctggaaagctctggcacagtcctgggaatctggaagaccatgggtgtgtgccgggctgtgaaaatcccagagagagagacctgagaaggccctgatctctcacctctggctgaccttgaggctctgagcaagcaagatgtgaaggagaaagagctgtcaactacctggctgagtgttgatgaaaaacatgaatgacgacacatttacaaagctcaaaaagctcccaatggaataaattcacagtgattcacacgaagacagattataatcaaactgtccaaagccagggaccaacagaattttgaaaagaaagtgaagagactcatcatataccagctggcttcgcatcagaagctttggcagccagaggacactgaaatgacacattcaaagtacaaaagaattctatattcagcaaaactatccttcaaagatgaaggagaaatgaagacattcccacataaaaaatgagggagttcatcactagtgagccttccctacaggaaatactaagggtaggcctccgggatggcatggaaggacactagacagtaacacaaatccacatgaagaaataaagaactccaacaaaggtaacaacatcgataaatataaaaatgtgtaccaatgtacacatttaatacagcttcattctaatgggcaaagtttttgtatacaactgaaattagtttggtaatacactgttttcagttaggatgctaaatgcaattctaaggacaaccacttaaaaataacttttaaaagaagtgttaaagaaccaacaagggaattaaaatggtgtacccacaaatacattttgctttaataggaggcagtttctgtatactattgaaattcatttggtactagactgttttcagttaggatgctaactgtaattctaaagccaaccacttaaaaaataactttaaaaaacagagttaaagaggctgggcgcggtggctcatacctataatcccagtactttgggaggccgagacaggtggatcacctgaggtcagcagttcgagaccagcccggccaacatggcaaaaccccatctgtacttaaaaatacaaaaattagtcaggcgtggtggtgagtgcctgtaaccccagctacccgggaggctgaggcagaattgcttcaacccaggaggtggaggttgcagtgagctgagactgcactccagcctgggtgacagagcgagactccatctcaaaaagaaaaagaaaaatacgttcacacaaaagacttacgatgtacatagccaaaaagtagaaacccacatctaccaactacaacaaaatgtgggatatccacacaatcaaatattattcaaccatgaaaaggaatgaactacatggataacccttacaaaactttatgctcagtgaaagacaccagtcacaaaaggccacacattgttattccatttataggaaatgtccagcacaggcaaatccatagagacagacagcgtctctatgacagtggttgccaggagttgaggctagggagggatggggaatggctgctaatcatatggggtttcttctgggggtgataaaaatgttctggactcagatagtgataagaggatggttacacaactctgtgaatatcctaaagaccatgaaattgtacacttttaaaagggtaaattttatgttatatgaacttgaattcagtagagctgttatttaaaaaataaattagaagaggtagaaaactggctttaccttctttctttgggtttattttgctgtttattttctagccccctgaaacgtggtattagtgcagggatagcaaaaaaaaaaaggaatagaatggaacagaggagaacccagaaacccacacataacatatggatacttaataattaccaagagtgatggtattgcagatcaatgagagaaagagtgatttccagtcaatggtgctgcgacaaatgtgtatccatataggatacgaggaaactggatccccacctcactccatatgcaaaaatcaactctgagaagatggccctcattataagccttttcccattttccttaagtaacttttttttttttttttttaagacagggtctggctgtcacccaggctggagtactgtggcgtgacctcagctcactgcaacttccctctcatgggctcaagtgatcctcccacctcagcctcccaagtagctgagactgcaggtgcacgccaccatgcccagctagtttctgtattttagtagaaacgtggttttgccatgttgcccaggctgatctctatgctcaaagtggttcatcctcctctgcttcccaaagtgctgggattacaggcatgagccaccgcgcctggcccaagttacatttttaattgtcaaatactattccattcaggcatttgttatcatttgcttcacattttctattactgagttatctcaattttctacgatgagcgttttcatttgataatccgctgaaagcattttttcaagtgaaggaaaacatgcattagaaaatgaaaaacaaaagaaggggccggtccccaaatgctcctccagggctagtggagcacagaaaaggaagcctgtgcgtggggcagccccaggcagagggccaggtgggcagccacgtacctagactcatgacggagctgctgccaccccagcagatctgctcgccttgctgcttcttcacggtctccacggccttcgcagaggtgtcagcaactgccatgaccacttgcagcagctggggagggagggagggagggagggagggagggagggagcgagcaggcactaaatgccgctggtctcacgtagcgacggcatctcctgcttcccacccccactcacactgatcaggtggcattcacctgaaagacagccaagggtgagggacagaactcccagcggggaagtcaccaatcagagttctcggacctaagtcccctcttcctggcccagtggggatgccacactctcatgtcgctctggcaaccctcgatgcctagggacatgccagccagcactgcgtgtcctcccagccccagcaattggcaaggggggaaaataaatgtcccaagaaaaatggacaggagagggctgtggcctcaccatccctgatcgaggggtctcacaggaccagccagtcagaggttggaaggctcggagcctctcgcttagaaaaccaaaatgaacatcacggaatccttgagccaagggcagagttgcgcacgtgggaactgtagtcatcgtaactaaagccggctttttaggttggcctctggggatctcacatgtggaacaacgaaacaagcaaacattgacgagcccacttcctctcatcctgtctgagcaggctcatgggcagacaggcaggcatttgtctgcctgtctggcacagttcttggtcatccacaagaatgaatggaccttgctattttggagcgtaacgtgacaacagtgcggccaacacaggaacagcacctggaggctgggacacgcaggaccccacaccggatctgggcctagctagtgcctgctaaggtgggcaggtccaaggaccagaagcagcacctccccagcccactgaggggcccagagccctgccacgccactggccagcagggagcccagcccagcccctcccagcccctggtcctgccctgtggtcccttgtcaggggctgctgaggcccctgagcccaagcaggatataagctctcagtctgagtgaacaggggagggggcggttagaggggaggggaagggcacccttacttggctgtaggaagtcagattctggtgcgtggcctggatgatggggccgcacgggtggaggtcagggcctgggcgctggcagcactcgcccagctcgtcgtcgtagacttggagaaaagccaagattagctggtggaagtcggaagtgaccagacgcagcttctggtctagggtgctgatgtcggctgcgcccgcagcagccccttgctcatgctgtgcaaagtactgcaaagccagaggcagagtcccttgaggctgccctgcccaccagccaggctgccaccggccctcacctcagacactgcacacccagggcgaggaagaaagctttcagaaacagggacacaggggagctgtaccgagcgactcaggccagagcaagaccttctggctcccagcctcagccccctcactcactctcctgtgggccccggtctcctccgcaatcaaacagaggccaggccaagggctgccaggaggaccacgtgcggcaaggcacatggcaatgtgctcaggcgtgggcaccacccaatacctgaggctgatcccttcccccagccacgggacccacctctcacctccccgcggactgagcaccacagtattctagaacatgtcaggcccggtgcacaggcaacctcgcctaagcctcacgtgctgagggaggtgacaaagcagggccttgcctccaagcaaccccctcccaggagctagcaccctcacctccgttctaagcgcgtgcaacttggcagcactctcctgcagctgcctggcaagctccgccagcttctcctcctcctcggacttggcagaggcactggccctgcagggagagaaagggaacacttgcaactcaccgctgccaggggtgtctgcagtaacagaaccaagcagcctggggctgggacaggaggccagggtgctgccactgaggcctccaggagcacgtaccactgccagtcatcactctgcttgttgaggaggggctgcatgtccaggggccacgggtcgcactctggattcaggagcatctgcaggtgggggctagagaagagctcccccagcaaggcctcgttcttctccctggtgtcctcgaagtgctccatcaggctgcaaaggcagcccccagggccacaccgtcacaggccagagcactcgcccagcaggccctcagccccacagggaaggccccagaagcacatcggggccaggcacagaggccaggacaagccccaccgcgcagaatcctgccccacctgtctgccctggctcctccatttttgcccgcctacctacccacccatggagcaccctaggtgctcaccctcctctgtgcctggcccgtctgctctgaggcccacatcccaccttcatactcacccccggggccttgggcaacagccagcacccttgggacacagctgccccttgcccgtatgctgcccggcccctgattggccagccagatccccaagtggggtgtcacaccccagccagcatcagagggggagtgacaccccagcccctaccagctccagaactaggaccaagagaagcccgtcaatactgcccacctgggccatccacacctttacctcgagcaactggagcacccaatggtcaggctccggatggtatcgagcaactggtccatgaagtgtagctgcttctgggcgcaggcacagccctgggcaaggaagaccacagacattcactggctccatctaagccaggccaaggccagctgtccccagtgcccctgcccccacatgccacccatgccaggagccaggggaaaggaggggcctggcccatcaacgaccctgtgcctgcccagcaatgtcttggactagcaagtgctccctgcctggtccctgccttgggctgtaatgatgctgggaccacacgccagaacgggctgagcactgcagaaacatacaggagcatatgtgtctgtcgtgcagccgacagcatggcttgctgggtgggcaggcagcacacagcagggcctgctatgacagaacacagcccacagggacacctccaggacaaggcctgttctcctccaaggatcgccgtcccagctgggaacagatgaagccgacaggatggggctgagaggtggcctgctttccagccaggggactggcgttccagcccggaaggcccaggctccaggagcagcagctcctgcggggctgaattagtcccccactcgccggaaaggtgagtgagatacccatgggagccacccagccagaagctcaaggcttccggaagcacagctctttcctccttccagaaaagggaagaggatcgctgaggagccccaggacctgagaggctacgcctgctccagaaagcccccagccaggcctacttcttgagctctgaacatcctaaccacgtcaaaagggtcaactccatggcatgaaatgccaccgggagtgccttggccctttcactgtggcctgtgccttcagcgccaacttgtcacacaaatgctccttggcgggcttggggaagctgccagagcagctggctgagccagtccgttctggtgcattcctcagaaaagtgtgtggcaggcgggggcaatgataaggtaaaattggcaacactgccaatagcatagagcctgggcatcaccatgacatccaactgaggcagattcaggagcacaggtgcgagaagctcagggcacccaggacaggggcgatggcactgggagggctcactgcctgcacggtggtgctgaccacagtcatgtgctccaaggtgatctgggggcagcgggctgccacgtccccacagcactgacctggcctatctacatgctgcacagcaatggaatcatacactaccaagcatgaggctggcgaggatcacgcgtgtcccagcgcagatgagtagttgatttcctttttattgctagttagtttatacattcaccagctgatggacatttgggctctttccactttcaggccattaagaataacacttctatggacgctcaggtacaggattttgtgtgcatgtatattttcacttctcctgggtggacagctgggagtggaactgctgggtcacggggtaactgtgttgacatctttcaggaactgccagacttttccataacagctgcaccattttatattcctacagcaatgcagaagggttccaatctctcctcatcctggccaacactgggattttccttttttttcttaaacaacagggtcttgctctgtcgctcaggctggagtgcaatggtaccatcatagctcactgaagccttgaactcctgggctctatgtgatcctcccgcctcagcttcccaagtggctgggactacagcagtgtgccatcatgtctggctaattttttactttttgtagagacggggtcttacgatgttgtctgggctggtcttaaactcctgagctcaagcgatcctcctgcctcggcctcccaaagtgctgggattacaggcatgagccaccaggcccggcctccttttcttttttgattctagccatcctagtgtgtgtgaagtggcatctcatgatgattttgctttgtgttcctctaatggcccgtgatgctggccatctttgcttgtgcttcttggccatttgttcatcttcttcggagaaacgtctattcggacactttgtccatttttgaactgggttttctgtctttcttattgagttgtaagggttgttaatagattcgggatacaagtccctcatcagtcatgtgatttacaactatttaccgcctttctgtaggtttttctgtttcttcactttcttcatggtgtcctttggtggaccaaagtgtttcattttaatgaagtccaattgatctgttttttcttttgtcgcttatgtttttagtgtcaaattgatgactttataaaacatcactatgaacacctggatttgggcatacgtgaagggtgcctgtctactgcagcccctatgcttacgaggctcccactggcccctctctgactattgctagttggctcctgagtccctcggacgtgacccaagtcttgggtgactgctgctctctgtgtttccgcctgcattacagccggggtgtcatattgttctaggcattttcagggcacaagataaggaaatacatatatatcccttaatgtaaaaatatatgcggaggacgggcacaatggctcatgcccgtcatcccagcactttgggaggctaaagtgggaggattgcctgagcccaggagttcgagaccagcttgggcaacatggcaagacctcctctctacaaaaattttaaaaattagctgagtgtggtggcgcatgcctgtgaccccagctactcagagggctgaggtgggaggatcgcttgaagcccgggggctcatgctgatattcccaattaaaactcaggactacaagggttgaccctacctaatgatcttaaatctgtatctccttcctccctcctccaactcccaggtctcaataataccaatggaattctccaattcctttgattgtttatccataacaaggaatgcagtcctgctaagtgctgccgcaacatggacaaaccttgaaaaccttgtgctcagtgaggaagccaggcaccaaaggccacacattccagcattccactccaatgacatacagacagatggtaactcagtggctgccaaggcctgaggggaatggggagtggctactcagtggttcagggtcttttgggggtgatgaaaatgttgtggaactggatagaggtggtggtcatacaacactgtgaatgtactgaagaccactaaatcgtacgctttaacgcggcttaaaaattgaggacgaagtatcagtttgggaagatgaacaagttctgcggctggatggtggtgatggctgcacagaaccgtgaatgtgcttatgcccctggaccgcacacttaaaaatggtgaacatgatacaatttaggtgatgtgtattttaccataattttttaaattaaaaaaaaaaaaaagcagcagcgagctcccacagggcctgttaggaaattgtttttcatgactgacatggcagattttacgtaaagtgcactttgccacaatgccaatgtggaaatataaagcaagcgcagtgctcccacggctgggcagaatgtatggggcaggtgctcgcaggctctgagaagcgaatgtcagcaggtgggtcagggaggaacaccaggattccgagttctcctgcagactggcagggagctggccgtgccaccaccatcacggaagtgggtggtttatgtctggaggacaggaaaagggagccccagggaactagaaagtatccaaaagacagtggagaggaaacggctcaagaaagtgaccccacaaatctgtttacaatgcctgggctcaggcccacctgtgcacaagtggatctgatcttggtgagcccagcaaagtctcccaggctgaccactgggtggcgcacacacaggggggacccgaagagccatgcaaaggctgcagaaacagagctgatgctggaaggaacggcaggcaagaggcgggaggcggctgaacttgctccttaaacctaagcaggtcaagtgcctgctaaagcacaaatatgtatacaaatataaattgtgtggagaatacattttcccagagccaaagtaataggcaaaatgtcgagagaactacttggcacacggagaaccacggactctcaaccacaggagagaagactcactggatatggactttgggtgacaatgtgtccatgctggttcatggactgtgacaaaggagcccccgtgtgcagggtgtcgtgtccatggcgggagaggctgtgtatgtgtggggcagggggcctgtggagactctctgtactttctgctcaattttgctgtgaacctaaaactaccctaaattattaagtctactaattaagaaaaaaaacaaaacaaaacaaaaaaaaaacctcactggacaagtgacccaattaaaaagtgggcaaaggacatgaatatggaaatttttccaaagcatatacagaaatggccaacaagctcacaaaaagacgctccgtatcactggtcatggggaaatgcaaatcaaaaccataatgagatgccaccccacaccgagcagggtggctagaatcaacaagacggatgccagcaagtgccagcgaggacgaggagaaactggagctctcccgcgctgctgctggaaaaggaagatggtgccgccgcactggaaaacagtttgggggctcctcgaaaagttaagcacagagtgaccctgtgacccagcaattccactcccagctatacacccaagaggatggaaaacacgtgttcaaccagccagtgtacatctcacatggattcactgacgtcttatgtctccctaaatcgtagaaaaccagctgtagcccaaccaccttgtgcacatgttctcaggacctcctggggctgtgtcataggccattggtcacgtgaataaatctcttcagatataaaaaaaagaaaacgtgttcagtcaaaaatcatatgcaagaatgtttatagtagcattactcataatcatcgagtgaaaacaattatttcaaaatttagaaacgagaaggtgggtgctggagtttctttgacctaccgcagggtagatgagggacctcgggagaaactctcgggccacaagggcttgggagccaggcgccgggatgaatgaagaatgaagtcatcaaccaaggacaggacactttccatcccactggtcatcagaagccagagatctgcccctccctgcacggctgccctctcccctgcgccccagggacaaccaggttctacccaagagaatcccagcagttctggccccagggatgcctagagaagcagcctgcccgggcacccagccggccccagggcctgaggaacctcaaaggcactaggggaggaaaatcctcccacctcagccagcaccatgaggttccctgcccagggcagaaagcgtgcgtgccgtctgcagagcagacagaggccctcttaccttgaggagctcctggtcatctggcgcacacagcatcagctcgtggcccagcttcgtcatttctgttgaaacacaaagagcccatcatggcaggcacctgcccagacagcaggggacagcagacacccaggaagcccagcacccacagactagactgggtataggagaccagggtgggccaggaggcaggcacccaggtgccagcgctgcctcttgctgagtggccccacccctctctgggcatcagcttcctcgtctgaaaattaggaattgtacccaatgctctcccaggtttggggtcactcactctggctttgagcagaagccagcagctgcctgaggagtggacaggggtcagtgaacctctacagtgcactgtctgccactctctccaagacctcacaaggccaaagcaaatggactcaccgctcccatctggccatgtcctaaaggaccttcgtgccatcatctgctatcaccctgccagcagccctgggggtggaagaccttgttccatttcatgcatggggaacctggcgccgtgcacactgcagactatccagccacatctgccagggtgcccagggcattttctgagtaacttggagccagaaagcctggggccgatgccagacctgcccctccacctaaccctggagggtttgttgcaagaagtaagcagagagtctgtggggaagcactcagtaaccccagaaccaccatataaatgccaactgcatgcctaggcaagcctgttccaccactgcccttaaccccacatcctcaagtcctccctgacccctctcttcctctcagcgagtccagccaactctataaatccagatctggccagcgctgcctcctgcactgcctctccaaactttcacctggaccactcactgcaagagccccacaccgctctccctgcctcttccccgggcaccctgttcccagcacagtgggccaggggtgtcgttacagccaagagcagaactcggccttcctcggagtcaaagcccacgtccttctggggcccacatggcctggcctgatctggcccgtcccctcccaacctcactccttgccctgccctgctctccagccacaccagcctccttcttgtgcctccaagctgccaggcacagcccacctggggccctgtgcgcatgctcttcctctccgcacatgccgcgctggcttccgcccctcctgccatcttatgtcaagacagcaccaccctttccccaagccctgcaggaccctcagccctcagctggctgttcccagtgcttctcgctggcaggtgcatgaacaattctcccaccctctggccctgtctctccccgctagcacgcaagcgccacgagggcagtggaactcactgctgcaccccagcaccaggaacagcgcctcgcatgtggtggctgctccttaaccattcgtcggatgaattcctgaactatcctcacaccctactggtcctggtctctcccacctgccctctgacaagcctgacactcagtatattcccatgaggtaggcaaggctgggtttcatccccacttgacaggagaggaaacaggctgggaatggcggtgtcagggctaaggctgggctgggtcgggtcacacatgtgttggtgtgggtcagagaatctggaatgtaccagacacggcagctccagggagaagggcagtgcctctgtgtggcccaggccagcccaccggctgctctaaaacaacacctccttcttctggcccacttcagcacaggaagaactggccccagataactcatgtggcaatgccagctggggcacggatcaggactccagggtccagcttatctaccctggagtggccagaacagacacaggcccatgaaaaatttgacctttgacattccaccaacttctagagagatcaccatgaagatgaaaagttagccaccaacttggggactgcagttttgctcacctttatccaacattcattaccaggttaagcacggtttctaccaagaaatgatagaaaggaggttataaggcaagctccgctggagagcagcaggtgcccctagaaatgccacctgtagagagcgtgtcacacaccactgacacagggagacggaaccactgctggcatcggcaaaaatctctgtctctggccaccagcgctgcagggactgatgtgctctaggtccctgcgagaggagttctcccacctgccatgcctagggaagggtggggttcaagaaggctctagcaacatccacacaacatgcaccacctaaaagaaaacgttggtccaatggaacatgcaccaccactccataaggaggctgtggacaagctcagaatggaccaagattccacctaccttggatcttcacctctgttgggacccctttcagtgagctgaacctgtcctgcagtgagggccagaccctgcagggaaacagcagagctggtcaggccggagacagccagagaatccccctgggccctctatacgcgctggaagaagtgaattcctgtgcacgtgctcaacggcacggagcggctcactttaaagtggttacttctgtgtcacgtggatttcatttccattaattattagggaaagaatattccaggaagtttacctcggaaatctggatacagaaatgaatctggatactgaaatgaaaattcttctcaagaccaaaaaaaaaaaaaaaaaaaaaaaagatggctgcagcagaggcagagagggaagctgccagcactcagggctctttctcgaaatggcgcagcgggtgggttttgagggctggccccgggctcctggcaccctccccggcctcgcctgggtcggcatcaactgctccagggtggaaaactttcttcccacccggccctctgcagaaaaggcttgtgaggcctgcattcagtcatgtgggggctcctgccgcaacagagtctgtggtcacagtcgaggctcatcaccttgggcacggtgaaggcttgcccttgactgcagcacacaggggccgctcagaagcatgtcaccttaaaagccatctggtgggcaaaaccagatccacatgcacagcgcatggaaggcaggaagtcccacgacacccagacatgcaccacaggtgacacacggctcagccctccactgggtctcctccttcaggggagcacagcccaagcactgcatccccagtcccaagccccatgcctcaagcccggtatgacactgaggcccagaaacatcactccggccgctggggccacaggctcttacccgggagccccaggcacctgccaccacagcagcctttcataaacaagaaggagtcgctttccaccaggctgccagagcctggctacacctcaccattgccatcactctaggagcctgctgactcgtgtggtgggaaagggctggtggctgttccctggagaggccacacttgccccagaactgcaacagagatcgggctgggcttggctgcctccacagcaccacccacctctgtgacttattaagacaaccgtgggttctgcgcaagcggggttggggaaggaagggggaggccagcaggctgggctctgccagcggggttgccgagaacatctctgagcacaaggctcggaggagcagagggcactcacccagcactgtgcaagggcgggcacagtaaaccctgaacacactcaaaacccacgctgcagaagccccagtagccagactcagtaagggctgtcactcaagtcaccgcaccgtcacagcagagggcagagcaggaacagaaaatgctggaggccttggaggccccaaggaaagccacagggccttgacctccacaatccagggggctccatgagctctgccccaacccacaccaaggaccaacactaggtgcagcttccaggttctactgggaggagatgaaaaggcggccctaaatggggctgacagggtgcggtcacgtacaaagaaaggcaatgggaaattcacaggaaaactcccatccatctgattctcctgtaggaccctcaaaaggcctaaggaattctcgccaacctgaaatcagacaacgtcatcgtatgctccctggcagctttttcaaaggattcggtttctggtatttacagaagtactacaggttgaatatccctaatctgaaaacctgaaatgctccaaaatcctaaactttctgatcgccgatatgacgctcaaaggagatgctcactggagcatttgagatttcggattttcagattagggacactcgaccagtataatgcatatattccaaaatccgaagaaatcgaaatctgaaacacttctggcccccagacattttggatatgggacactcaacctgtagaagcatctgaggggcgtggctttggcctcctacccgtccctctctggccagatgaccccagttccccaagtgcccccagcttccacctgagtcaggcaaatctgcgccccctcccacaagagcctcctcctgggagctcgctcaagaccctcacactccacccagccatctccagtcctgcctcacctcccagcctcccaggttcccaggccaggggctggtccctccagggccagtagtggctgccagacaagccatctgccactcagcgcagggctccttctgtctttccctggggtattggtctccctgcctgcagccattgccctccaaatccatctgccacagagcaccctgagtcaccttaccaaaatgccaatctcagcacgtcgctccccaggttccacgcctgccctgcccagaacataaagctcaaaggccttggcacagcatgcaaggccctgagggagctgccctgagctgccattccagctgctgctgcccagctctctctcccacacctcaactccctgctcctgtccaaacgagcaccccgctgttaccgtccccatcccagatcaaatgccacctcctccctgccaacatccacagcacccaactcagactgcagtgctgtgcatcatttctgctgaaccccaggacttgtacccactaaatacccagctcctgaggacacccagtcacgtctgcagcgcgtggaatggcacacaggtgcagcctggagaaccccccgactgcacggccacaccatgctgcggctcccatactaaagagccggaaatgacagcaggccaagagtgcacccacaggttgagggctccagcaggggcagggtgtgctcaaaggctgtgggcatccagagggaagcggaatacattctgccctgggaacaggaaacattttaaaaggagacaggacgtgtgagttgggtctttgcgggctgtacaggaggacgtacgacatgcagagactagaaggccatttccaggagggggaacaatgtgagcaagagcaaaaggttatgaagcgaggagctgctgtgctgagccctggggagaggcctgaggaagggcctagaaggcagaggcaggagacgcctctggaacagcaagggctcaaacacaaaaacgcctcctccttcctctgggggcctgtatccagctgggcgtcctgctgatgtctctggtcctggcgggccagaccggctggatgcaggttggctccccactgctctactgccaggctcccgcccaggccccttcctcaagcagcaagggtaggcaggccgcaggctgaggagggggaggcccgggcctggactcacgagaggctcctgtaccaacagactacagctgttcctgagcatggcctgggcacacacccaatcccacaggagcctgtgctctgtgggaggcggggaaagccttctccactcacagctgtgaggcagtgagacagaccctcagctcagggactacgtcaccaggggaaggatgtctgccctgggaatgggacactctggatcatttcctccaccatcactcaggaagtcaccctgtcaccatgggcttcatagggtgccaggcacacaccatgctacaccctggcccaaaggcaccagaggactgggaaacgggtcacggcacagaagctgacaagaggtgacactgcatgaggaccacttggccagctgagacccagccaggagcccacgccctggccctgcctgtcactcctccactgggagaccagagactgttcatgcctccagcctgacccttggcttccgggtctgagaaggaaaggactggaatggagcatttctcaggtgcctgccagtcctgaacctccaaactcataaggcaaggcaaacgctgagggcaagttcagcactgcagcaaaggggtggctggactagcccagcaccgccaggggccactttgccccaagtttgatcatgcctgtcaccagtactccttacctacacagctgttctcacgagggtccaggctagggggtggagccctctgggaagacagctactcacagtaaccacaaaccccatcttccccaggtggggctggctggcgcccatgcacaccccaggtgggaagaggaagaaactgatgcattaccgggtacacatccactctaggatctccaagcggtactctgaggggctgcacagcagttcctgaattgtctttggctctgtgatatacagaccctcgaggaaggggcagtttaggtcctaagcaaggaaaaggaaagcaacattcactgaaagtcccagtgtacatcatttcattttatttatttatttatttttgagacggagtctcactctgtcgcccagcctggatggagtgcagtggcatgatctcggctcactgcagcctccacctcctgggttccagcaattctcctgcctcagctcccagggtagctgggggattacaggcatgcgccaccacgcccggacaatttttgtatttttaatagagacggagtttcaccatgttggccaggctggtgtcaaactcctgacctcaggtatctgcccacctcagcctcccaaagtggtgggattacaggcgtgggccgccgcgcccagtcctcagtgtacatctgcaagctcccaggaccctttcctttacccgcgtcctgccatcttgccaagagttcaagtccccccattcttaaccccacatctcccgcggcatgcagaccccacctctttcaagtactcccactctgggctcttgtggcagcaggacctaggagcaacgcctgagactaagacttaagagagagtcctaggtttcgggactgagggaaaggggagagggaaagggagagggaccactgagccagtcgcggacaggatgggggagtgtctggggggaggagcgagcgggccgaggggacctgggacagctccctaacctcgtgggccagctttcctcactgctgcagtgagggctctgtcctgtggggctgtagagggcttctggaggctatcacccctggcatctgacaccaactgacaccaagccctagtctcgctgacttgacagagtggcacgaggctctgcccatctgtccccccagaccccgcaagatccctaaggccaggcctgggtcctctgtgtctgcacttgctccgagcgcccagcgcgggtactgcagttccacaggcggtgctggccccaactaccaggcacgggccgtggagacagcaagaacgaaggcctggggcacaccaaagggcaaagatgaatgatccacaagcaccccctgctgcaagggaacagggcgcagccggaaccggcgacggtggccgcgtggcgccgcggacttccgcagcaagccctcccgggcctcgggcggggccctccccggtcccccgccctggagtggctttctgggccaacagcaccttcagcttcccgaacacctccacagccgccctggacacgctgctgtcgccctcgtcctctgagtagtcgtcgccgccacggccgcagccagcgtcctgccccgccatgtttcgcgctccgagccgcgccccgcccatgccctggcttcactggccggcaagaccgccaatcaacctccagcgttcttcccgcccacccgcctgcgcccacccccttcccgaccgacccttcccattgggcgacatctccgcctgcgcgggccccgggctcccaccccccgccccggcaccacccagaggcaggaccacagtgaagcgggcagggcggacacagggaagggggcggggcggacacagggaagggggcggggcggacaccgggaaggaggcggggcggacaccgggaaaggggcggggcggacaccgggaaggggcggggcgaacgggccaagctggctctgagtcgcaggccttgctggcgtcgcccctgctgccggccgggaatgatgatgcgttgaagcgaggctcttccaggagggggcgctcctgccttggtcgggttctcctgggccaccaccactaaggggcaccctggttcccaggaggaccaaggggagccttgggtgcagaatggaactcggactgaagcgttcctctcccagcgcggggctccgtcttctcttcaccatgctcacgctgtagttagaaggaaatttcttgtcactcaccagctgtgtgcctttgaaccagttacctaacctctctgtgcctctttgccctcacctaatggagctaatgagagcaccttacccactgggttgctaatgaggatggcaggcggtaataattcctgtggaatccctagaacagtgcccggcgcatgcgaagaaccacgtaaatgctcactattgtaatacatgctgggccctgctcccctcacggctcctggggctacctgtggctccttcctatcctgtctacttaacaaatttttctacatccctcaggaccctcaaactcaatgcgtctgcaatgaaatatgtcagtcgctcctcccccagacctgcaaagcccccagttcactgaatgccccttacccagggacctgctgattgggcaaggcaggaaggagttggagggtggcttgtgcccagtagccaggagacagcagcaggcagctgccactgtgccctcctctgtgccctaccctgccatctcctggagggtgggatcagggggcaagtctatagtcagggagacccagggacctgctgggaggcaactgcagtcatccaagtgacaggaggggacttcactccgtcctgggaggagggagcgggcaggagtccgggggtcacaggaagggacctcagcctgggaggccccgacacaggcccagcgaagtgcctcaaggttgctctctacccttccacgtggctgctgcctcaggcccttctggtagctgagggctgtcaaaggctttgggatttttttttaagcgtttttttccctcttttttgtttttgtttttctttctttctttttagaaaatttcatctcaatcacagccccagctcagacattcaaattcttgtgggtttttctgtggatctttcctaggactggggaatttggcggaagaaaccacggcagtgtggcagcctcccccaaccctccccatattctctgctcctgaggaccgggaagaaaccagctcctgtgtactctggaagaaaatctccctcctccacccagctccacggagccagtgtgctcaacaggcctccccaacctcagcagttcagtctatgggaccctgaggaactggcagggccttgagaggcgaagatcatcttgagaggttatggaggccatccccctcatggagaacctgttggccagccctcagcccctggagatggtcgctgaagacccagcagcaggctgcagcttccctgcccacgccaccccaccacccaccacccaccacccaccacctgccacccaccacccgcccccagaatcatagcacctcccaggcatcttcctccggaaaagctggaggctggggagggaacagagaggctgctgggcctctcaggaagggggaaagaaggggcccagaggtagaagcttctggaaatgtggactcaagctcagtccaagaaagcactcctcccagaaatcactgtctgaacaccagctggctgccaggagaggaagggagctcccggtcctagaaggtctacaagcccagggaggtgggtgggcggggatgtggagggttgagtcctaccatgggggagggagggggcacatctctaagggacattccaacccagagaccccaggttctctgagggaggcctgggtgggtcaggagccaaaaatgtggctgaaggacccattgacctggaggagggatgttggggggaagctgtggatgtggcggggaagctggggggtcctggtcatggaggaaagttggccatgcgtcccagcagggcctcagccgtgtcagtgcttggaaaacacgttggaaaatgagactggttcacggcactggccccgctgtgccagagatgggctggcgggtgctggtggcattcgagacctctcagtttgtgtggtgggcccagagatatatggccaaacagttgagctcaccaagtgggcagcctccctgacctgtggagggtattgaaaaagtcctcagagcatccgggccctgctcttcatatgaccttaagggcagaccccacggtgcagcgggaatcaaccagggaccccccaatcccccaaagacaccgcgaatcaaaggaagctgaagtccaagggctttcctctctgcagaggcgggtctgcttctggcaggggctggagttagacctgagggggagccaccccacctgggggcgcctaggccctagaatgctgtcagagctaaagccctagaaggccttgctccacggggccacttcgactcccggccctgaaccagggaacctggggaggagcctttgagggactgaagtgtcctccatcaccccccacccctggccactaaagttcctcagtaagggtggagagtaccaaatgcaagctgttgaagacaaggcaagtgtgtgcgtgtgtgtgcgtgtgtgtgttttggggagagttcaggtctaagatgagaagctgatcacacccatgcgagaagcaagtggtgagccctggcattgggtttgagggagaaatgtgacagagtaatgaggtcaggctcaggacggtctgagtgtgaggctctccgcaggcaaggcaaagccagggggctgcctctgcctcccctcccctccctccccgtcctgtcctcctctccctcttccttctcctcatctcctccctgtcttcctgggacctctctgctgctaagctgccaggctgagctgttggtcacccatccaccctgcatcctggcatgcaggctcagtacccaggtcttgcgggcagcccacgccatctgcaccagccaggagcccacccgaaacccagccctatccttgcagatgggggaagggatggagaacacgaaagcaggggtgggggccttgcaaatgagacaaggaagtggctgtaagcttgggggagccctgcggcctgtggccctaactctggagggaccacactgtcaacctgggagctgcctgaagactcaactctacaacgttctcctcctaggcctccgtgttcatctttggagtctactggcatatgagaatggagaggctgccttgggaccttggcttcctcttcctgtcacttctagtccctatgctgggcctcctgctttagggccccaccctcacctcctgcagttgaggggccctcacctgccccatcctgcccccaggccaccagctcctgcaagagcacattccgcagcgcagtcagcatggtaccaccatcgccatcaccatcgcctccagtgggcctggaggtgctaccatcacctaccccgccctgtcccccaggccacaggctcctgcaagagggcagggcctgcgacctagggcgacccttgctctgaggccagaggcagttgtagggggtgtggacagagtctggctggcagggaggcagtggctcagcggtccatctttgtcctcctgccccgggccccaaaaatgggagggatggtctggggccctggggacctttgggtttcccgcttctgccctcgaactgcctgtttgcagtggacgcaacgggagaggcgggggcgggggcgggggcgggggcgggggcgcgggcgctggcgcgggatgggcgagtggctgcgcgtgcacgcggctcgcgggaggtggcgggcgggggcgagcgctgctgcacgtgcgcggggcgcagccgcgcaggcggcggcaaaggaaacggcggcgggcgggatcgccccctccgcggggagacgctcgggtctagacggcttggcaaggccggcggggctgagtcacatgcgtctggagcgggaagcgagggcgccaggacgggaacacgaacgtgcccgctcggagggccggccgggggagggggcgcccgcctcgccttcttgctttgcccgagctccccggccgggcctgagctccagcttctgcccaacctccgttccctgccgaggtcctcgaagcccaccggaggggatggggcggggccgctttcacacggagtccagcgaagccacgctatgggcgggaatgaactcgaatttcacacgggcaaagagggtgggaaactggcccctattctgcccccatcccgaccacggccctgctccctatgggctggtccctgctgcgtgccaccctctgcagtccccctccactggcaccctccaccccatccgcagccacccttgtcccatttggggtcctgtgttccccttccctcctttttcttctccacccccaccccgcagcaggctctctcgctcaggatcaccaggtctcaagcatttagtgctcaccaaagcgtctgcaagaaaagtcatttaattgggaccagatcctctgaggtttcagtagcattaaaataagatgggtttcctctagggaagagttgcgggcaacaggaagagggcatggaaaatggggcttttttcttctccaagctttaagggggaaaggccccatattgttactgacatataagatagctgcaggcgcatgtccccagagaatgccacccatgtgccacacactgctgtcgttttcactcagacaacatgtggaaagctcaagaatgggcctgttccttttctctgggggtcaccccaaggctgtgtctctggctgccctgggccctgggaaaaggacaggcacgtagtaggtgctcctgcagagagcaggagagcaggagagcaggaacagcccccagaccttgaccctgaggcccaaatgctcctgaccccacccgctcctcctcgcaaccccgcctccacccttggccagccactatcacctggcccctggcgggctcagctgccacacggtggctcccacctcctacccttatgcccccagtacatctgctcgtgctccaccccacagcctgaggggggccggatcctgtgactcctctgcttagcagtccaaggtggctccctgattctttcaaggacaaaggcaagccagcccaccgccacagacaccttcccacggctcactcagcctgctccaccacattgctgtcattgccaatgctcaaattgggcccaaccctttctcacctggggcctctgcactggccatccctctttttcggagggctctttctgtggctttttgcatggccatggcctcttcactcatgcctctgcccaaatgtcactttctcacggtcctcacctgatcccctgtcagtgagcaaagaatccactgtccagtcctcgttgatgacagccttgagggacaaacagcattgctttggcatcctccaggctaccaatctgagtcccagcttgtagagggtatgtgtgtgcatgagtgtgtgaagcgtgggctacatggaagggaagggggaggaggacaagggacaggagtcccttccttgaccttagaatcctgggattgtacaactagaagcgaccttgatcatgtaatccagcttctctaggcgccttctggctctcagattctagaactttctaaggagcctgtttccaccatactgaaatgagaagactggggcactgaggagggagggaagcttgttcctgatgtcacatggccagtccgtccatggcagaactgggagcccaaagctctttccagcaaccctcgggctgcatccctggttcctggaaaatcccaacagccctcccaccctctgctccagacaccgggctcgggattactgttggcttggggcctgcctgtctcagcacaagtccgtcagtgagctcttgggcgggggggagggcaaggcagaaacttgccgggagcctctggctctgctgagcccctgaaggctggctctgctccatgggggttccttcaaggtccccacaatggccgggtgccctgggactggacagagtgggcagcaggagtaccactccccaggggcccacccaggtcagccaccaggctcccgaccaggggaagggcagcgaggccaggcctccatgggagctgggaactgagagcaccccaggcctcaccccttcctgcctaggtgggtaggagcggagtccctccctcctccaggctggctgtgccagagaaacctgggagcaggcttcccccacccccagcccagctaatgggaaccagatggcaggatgtttagtcagcgcctggggagcggcgcaaacaggggaaatgggtagggggccaggattccagaatccatccccaggcagggggaggggcggagccggggttcccatcaccgtccagtctcccgaccccaggtgctaggctcagctcaggcagggacctaccccgtttctcaggcgatgcctggaccaggaggcaggaggactggcctctggtatcgagacttgggtgagccccactccttctctgttccttctctgtaaaatggggggtcgactgtgctctgtcttgcaggatcctggggcaagcttcacttagtcttggcagcatacttcaagtctgccgtgccccagtgctaccctgtcccagcttcggcagctgcccccaggcaggacactggcccacagccatcctgtgtcacccacaggacgcacaaggagatggtggcctcatccctgactccagaggcatttgctgactccctagatggtccctgtttctggtctgtacgtggcagggtccaaattcaggtcagaaaccagagccctggatggcgagggtaccctggatatagcagaggaccccatgtggctcctacgggactgttagctggagcggcagctcctcaaggagcccagtgaagacccagttgccaggcctcctccccaccttgaccagccctgcacccctctggatctcacacattgcctcattgccccaggatggagactcctgcctgatggcccttgccggcccctgcccctcctccactgcttcccttctcccctccacccaagccttgcccacaattaactcatttcttaagatcgcttccaaacctaagtcaacgctggacagggctgtaggaaaagcttcctcaatactggccctgaagagccgagccagcggtgagatcagtcctctctgccagcccccgcctgcctgctcccacaaaccctggctcccacagcagaacgcggggttggggctgcagggacaccccagttggagcagggacttccggcagccctctgagggtggcgggctctaggaactggagccagacacccccttatttgcccctcactccaccacacgcccctctggccccacccagcagtcccctcatcgagcccagcctattttccacctcatgtcatcctgacccacaggtgcccctctgaccaaaaggatgcgtgcagcctaggcacatcagagatcccagactgttggccaagaagtctgggggggacctgtgacatggcttcacccaggcagtgcctggaacacccatgctcctatgtagggggtcgggacagccacagaacgtcaactctgccccctaccccattttacagaggagaaggtagagacctggagggcaagcagaggaaccaggagccagcccagcccgaggcacacccatgcccaagcagcactggggtctcaggcacgggaggcataccctcgccgcctgcactgtgcccacagattctatttcctctggaacccggaggcctccacagtgctgcccacggcagaagcccacggccttggcacccaccccctctcctttcgcagccatggatgcagggcccagcagcctgcggtggccgacccgctctgtggtgggcctctcaggcctgccacgtgtgagacagaagccccattcatggaggccactgggccagagccagcggagaatcaatgcgggcctcacagcaaaagggcaggaccgtccggtctgaggaaagggcaatctgtctttctcttcaggtgggagcagtgcacgttgtggggagttgggggcaaggtcgggggaggcgtttgctcgacagaaggggggccttcccagggaagggctggggtgggcagggaagactccaagtgccgcagccagggccaggagctcagggagcaagaccaacttgtgccgtccgccatcgtcctgccgtggccaccaccgtgcctctcccagctctccttccctccatggcagccaagaggagtgtgctgctccccatcctggcactgtgggcggggagctgctcaggaggggccccaccaacccccatgggcttggctaccctgcagctgctgcccagcccaccaggggcccccgacggtgagtagctggcaccagcaggaagaagactgccgcaggctgtccacctcaggcccactttgggtactcaggcagggctgcaaagggcccatggccctgagagagccctccctggagggcgaggggtgtgcgcagactctaggggcgagggagggaagaggccttcctaggagcgggcgctacagtgaggctgagagcgggctggggtgtgctggggaggagttgctctggctgccccagtgcctcctgagacaggaagaatctcaggtggctgggagtatagggcttgggggtgaagtggggttgctggcagagaggggcttgaggggcccgaggacatgggctatgagtgtggcctttgtcttataggccagtggttgtagccacacttggtggccctgccccaggcttgggggtagggcgggaggggccaggtgggtgggtctgcccctcacccctgcagacagagcggtgccccccatggttggccctggttaaggaggagctgctccatagaggacaggaggcattggggttatcaacattcctccaaagtggctcacagaccccttgaggtggcccctgggcttgcctaatccccaacaaaccccctgtagcagacactggggctttcacttctaaaagcaaattgtgccaggtcgcagcgaccccttcatctccccagaagctgtccctaggaagcacgtgtgaagtccttgctcactaatgggtatggggcaaaggggatgctggggaaacgccctaccccccacccttgggacacactggggaagtgaggggaggtgggacccaaggtcccttgagcagcccaaggctttctacccagggctgctgaagctccctgggcccaaccaccggtccaacccctgggcctaacctataggcccagccccttagccctaatgggcctagagcgccacccacccccctccccagcagtgaggagctgtgtaagttctgagaggtactctgggttactggccccaggggctggtggcctgctgctgacggtggggacactctgttctctcgccagtgctcctcaggaggtaagggaaaggcggggcggggggaggcctgggtaaagaggaagggcgatgggctttctagcagctgacagccccttggggaaaggaggcaaggcccccagcccacactggctccttccgcaggtcagctgcagcccatccctggcatcggccacccagacaagcctgaggctgggaagctggaccagttgcgggatcagcccaccccgaagcagggagctcaaggaacccccacccagtccccctccactggctggaaagcgcttcccaggccagggctggccctgaggaaggagtcacccccagtgaccttggagcaggagcagggtcacaacaagggcctggtcgctgagtgggctcagccccaggccacagctgccatgagggctggggcagggaagcccgaggccttgaagctgaggccctggcaggccggcagggaccctcaagctcaagagggggcagcagtcaccgaggaggaccagggccagaggacaggaggccgggaagacaagggaaggggcctgaaacccaggaggccccccaaaggtgagaactggccaggacaggcggccttcaggtggggcctggggcctgctggggctgacaggaccacgcatgagtttggccacccaggcactgccccgttcccggtgtttccaagccaagtgccctcgtgtgtggggtgggagggaagccctccaaagtcacgtcccctccccagcctcagagcccccatttgggcctttgcccttggtgccaaggggaggggtcccagtaacctgtcgctccaacccaggctggctgagtcactggcaggccctgggagcctcgggcaagcccctgttcctcagtagggcccctgttgcttgtgacccagcaggggctgtctctcttcctccagggacctcccatcaacctgggctgaggatccggcgcccacagaaggaccgcagccgaggccagggtggcggcggcagcacctccaagaccccaggccatgggtggaaaagaccaggaagcacacatgggcacaggcacaggcacgcagacctgggcaccacccagcaggccatgccctctctgccggcctcgtgcctcctggcccaggcagtcatcgcctgtggcaatgtcaagatgaagcatgtccctgccctgacccaccctggtctgaccacactctacctggcaggtgggtggcctcctcgccccacacccacccctgcagcaggggtgagaaggctgagacctgggctcccaccctggctcccctgagcagccctgtctggtgtgggaggtacagagtggcagcgggcagggggcagagaatatggctgccccatgtgcgcacagagaatgaaattgccaagatcccagcccacacgttcctggggctgcccaacctggagtggctggatctcagcaagaacaagctggatccccgaggcctgcacccccatgccttcaaggtatgctgtggcccattcacctcttctcgggggccggggctggggctggggctggcaggtcccaggtgacctgaggcatccactcactgcagggtggagctgcttagggggtaaggcctggaggaggcactgcagagagcagccagcatggtgggcttccacaatttggtgtgacgtgttccatcgctgggagtagggggagcagcacaggcttgcaggccctgtataggagcaaacagaaaccttcccagacaggcctggattcagtgggaactaggaagccatgatgccaccaacagagtgcccttggtcaggatgggcccaaagccatgcccaggaaggcctgtgccccgaccagcaggcccccaaccccagcccacctattccccatgacctcccagaatctgatgcggctgaagcggctgaacctggttgggaactcgctgaccacagtcccggccctacctgcctccctgcaggagctcaaactcaacgacaacctcctgcagggcttgcaaggcagcagcttccgtggtgcgggcgagttccgggggcagggaccgagggggcaggcctgggcaggtgccccacccccaggacaggggctggcaaggggtgggtctgccctctaggaggcacactcgggagagtgcccagggcagcctggctggaacgcagaggagactgccagcctgggtaaggggccctggcctctaggggcaggcaggggttctagagctactgcgagcagctctgcaatggctcaccgcacccctctgcccgcctgcagggctcagccagctgttgacgctggaggtggaagggaaccagctgcgtgacagggacatctccccctggccttccagcccctctgcagcctgctctatctgaggctggaccggaaccggctgcgggccatcccacgcggcctgccgtcctccctgcagttgagctggagcccccaggatggggaggcaacattgttaccatcaaacaaccctgcctctgcttctgctgagggggcgtggagcagcccatagggggatctgtgcgctgaaactcacgaggcttcaggcctctcctcagcttgacctaaccttccagaagcccacagtgggacctcctggatggctctgcaccctctgggttctctgagtaaggcccataccctctctctggaccatacagtcccctgaaaatccacccctgccatgggcctgactgctcagggcagagactggcacctgagttgcacagacatggctgggtggaaggaggcagtgccggcagagaatgggcacagccagagttggagcctgaccaggtggccaacaactggcaggtgggcccctcaccccaacccctgaccccgaccctaggagctgcacctgggcaccaacctcatcgaggaggtggcggagggcgcactgagccacatccacagcctcagcgtgctggtgctcagccacaactggcttcaggagcactggctggcaccccgagcctggattcatctcccgtgagtggcagtcccagagcttcgccccaatgggcattcggaggcagagagcaaggatggcccagagcagccccgagaggcaggtggggaaggcggagagggcaatgctgagccacggagccccagagagggccaggaggcagggggctccaggggaggacttgttccttgggcctggtcttcggtgggtcactggggtcacctccctccctgcttaggttagcctgggccctcagtcaccacagactcttccaagatattgcttgcaagcttgcaaggccttccctctgtccctcccacccagcagaatcccctttgccctcccgtgcctaggcctgccctgccggcccccaggaagctcacctgggaggtgccacgggcctggatggagggcagcagtggtggggagagctggcccgacgatgggtgcagttaggaggtgacaggggcaggaagcagcgcggaagggctgggggcacaggaaagtggggaagagaagtgcatgcatgtcctggggctgccatcactgagtgccacaagctgggtggcttcaaacaacagaaataacctctctcagttgcagacgccagaagtctgcaatctagatgttagggggccgtgctccctccggaggcctaggatgggatccttcctgcctctcccagcttcagggggctccaggtgttcctgggcttgtggctgcacgtggccgtctcccctgcgtgtctccctctgtctcgtcttctctcttctgtccctcaaaagcacacctgtcatgggagcggggcccagccggggaacccagatgagctcagctcgacatcctcccctgcaatccttacatctgcaaataaggccacgttcacaggttctggtggacataggttctgggggccactcttcacctcattccaagaaaagtcaagggcaattccctggatctggttgggacagctaggtagagatgctggcacacaggccactcacggcaaccagatgctgtagggctgtaggagtcgggctagggagtcaggacacggtcctgggaacagcggggagggctgggggaggctgggtgccaggcgggaggctgaggagggcctgatgaccaccaaggcagggtggggccgcagtggggagggaggcgggggtcgacagacagtctgacccgccattccagggaccagagcctcccgccctgcatccttgcgttccaggaaaaagttaccaggacgtttgggtttaattattcctctttcctctcccccacttgccaagggggcaaaggaaagcagacagcagcctgggaggggctgcccggccgctattccactcccgccacgaggcctgggcagggggctggcggccagtcaagccccagctgcctcagccgcggcctctcctggactctggcgccacccatctcttttcgggctggtggaaaaggaggggaccgagaggcacaggagcagcccaaaaggctgaccctagccacgggggctgagggtgttgccaagagaagccttccctgctccctctctccatgttcttacccattccagaagcctcaccaccctctgcccttgcacacctgcatggccacagggaccagggcttcctgctgctggggtcagggcctcaaggagtcaggtgtccaccatggagcgaccgggggctcccagctgaaggtggcagcctgaactccactatcggacagcgagggctgggtgacctcccagggtcccccagccctaaccctcatggagcctgatctttttctccccacacatctagcttccacacatctgaggataagactgggagaggcaggatgagggcaggagagtggaagggacagaggagagggcttcgaggccgaggaccggcaggggcagagagctcccctgccccacttttcccctagattttaggcgtcaccctctgagctctgtcaggtgtcaggattaggagacaggagaccctgaggcaacacctggagggaaggaagtgagtgggaggacagttcctcagtctccacaatgacagcaggtatcgctagccctgcagggagcaaggaaggcccccacccagatcctctaatccctaagccttgggggacagaggaggacataaacccacacagggcctggcctgactcacacaggagttgccagagtcccagctgttgagagttcgggttgcggctgccatctcggagtgaatccccacgctcgtcttgggagtgtggggctgcagcccctggaactcccctctaggagttgccaaccgtcagctccctctgcccctgtgtgccccgccccacaggaagctggagacccttgacctgtcctacaaccggctggtgcacgtgccccgcttcctgccgcggggcctgaggcgcctgacgctgcaccacgaccacatcgagcgcatccctggctacgcgttcgcgcacatgaagccaggcctagagttcctgcacctgtcccacaacaggctgcaggctgacggcatccacagcgtgtccttcctgggcctgcgcgcctcgctggcggagctgctcctggatcataaccaggtgcaggccatcccacgcggcctcctgggcctcaagggactgcaggtgctgggcctgagccacaacaggatcaggtagggcccccctcctcgaccccacacctgtggccgtctccacccccgcaccctgccagcacacagaggaagaggtaccctgaggccaggaggccctgccttctggctgggctaggacaggctggcctttgggctccttacccacaggccgcagaggccgagggcaggagtcggggctcatccatcctcccccaatccagccatccacccatcttggttgccatgatggaggctgtgcccagtggctggcaggcctggaaagccaagggcaggcagtggccggatgctggcagggctccagcctggagcgacaagggctggggctggaggcctggcactgagcctcgagttgggagggggccaggaggccgcagtggtctctgaagcccgccatcactcctccacagttccgattctgtggctcggtcttactgcttctctcagggcaggggtctctgtctcttcttgaatgatgcctaccccgtctttccggggtcttctctcccctgctctgccccacccctcccttgcagacaagtgcccttgaattccatctgtgacatgcgcgtggctcaggactccaaccttacctccacacacctggagaacaacctcattgaccggcgccgcatcccgcccactgccttctcctgcacccgagcctatcacagcgtggtcctccagccccagcggcggggggaggagggctcctagtcctgcctgccgccttcctccagcacacactctgcttctcgagggggtggaggggcaggctgaggtgtgcttggcctttgcaccactgggagaaaggtctagaagaccccactgcttccagtgcacccacttcccattgactggtgaggccgcttcacttagcaaatggcccaggggcgaaaggtggcactggtttgtacttgaacataataaatgcagcttgggcaggctcaccagccagcctccctccctccaggagctacgctgcatgtcctggctctcccatgtccgtgcggttcctgggctgcacctgagactgtcagcaaagagattcagagggcttgggtcccacagcttctctgagagcctccccacccccaccctgcctcaccagggtcctgaagtccttgctcggtcccaagccatcaagaggccaggctccccacccttgcttggggcagcatctgcacctgatccgtctcatccctatcctgggcctggacccaaagaggtgggcttggctggcagagcaggagggtgtggaggttcagggcacctgccattggtcctagagccacccacacctgcactgaggcctggggcaggggctggtgaccaccgcacagtggcacctctcgggaagcccctttgcctctcccttgacacctcccccccattcctggccccagaaccctcatcccagcccccaacatgcacacccacctgcaagagaggtccccagggccccaccctcagctcacagatgagtaacttgcccagagatgtatggctggcttgctgtgagaccaggctgtgcccctatctgacctggtgccagggaagggtggggagtgagcacgtggtctgtgcaaagccaagccccgccctgagcactgggcaaggaccacccctggccagagtttctgactgtctgcctgagcgaggccggccctccatgttgacctccccatgtgccaggagtccctgggaagtgacaactcagccctgccgagccctgaagacagactggccagatatgctggtggagacactgggtctgcggagccctcgaaggccactgaggccattgccccgttggcctgcctgagtgagggggcccctgggaaccggatgggtttcctgggacagcctccacagctctctaggccaccaggccctgtgccaggaagggatagggacaaagggtcacaaccgcagggaacacgacagccactgccctgggatggggctcacagagacagccaggtgacaggcatgaaggatgccgcaggagagggcccagcagagacacagcccagccccaaggagcgcatggctccgtccctgtcctctgtccctctaacttgtgagcctccagcatgcccctctggccctcgctatcccaccccatcacctcagcacccccatctcgatctgggcacggccttcccattccccggcctttctctaccctggcggggccgcccctctccttcccctctgcctccgggctgctggatgtgggtggagcagaggaggaagggcacagggtgtccgctgcaaggacctcgccccgccatcagctctgcctaggaccggggcctgggaactgagtctcgccttgctcccattccatggccgattccccctacccctgcccccacccctgagttctcagtggagaaagcgccagactgtggcgggggcgggagaggcctgggaagctgtgggctgtttgctttggactcgtcccggcattccttctcctccagctggcccctcagatatggcacttcctgtttgggctgggtcagaggtcagcagcccacgaggcgctggccccactctcccagctctcacgacccctcctccctgcctggccgccccggtccctgcgcctcttgctcaggtcaccctgcagcccccaccttctcgcagtcccagaggtcaggcccgggaggcacaggaagtgcaggctgggtgagtccccgacatctcctgcccacttcttaccactgcccgacagatgaggcaggtggggaggagaaggggaggggcccctcagctgcaggagggcaggggccaggcaggccacccacaggtggttaattccacttctcagagcctcggcgggggctaatcctcctgtgaccttcccaactggggaggcaggggactcgcacttgggaaatgtacctgcgggctcttggggtcgtcacctggccaagggagaagctgggctgcagccgaccccacaggcccggccaggcctcagccaacctgcactccgagatggggcaaagggactgggcctttatttccccctcatgactgggacaagggtgctgtttccagcccaggggattccccagagggccaggagctcagggctggggacttcacttcttggggctgtgggagggctggtcagagtctagctggcaccacgagggaatctctagacagagccccagcccgagagcaagggcagcccagccgtggccctgcacctgcccctccttcagcacgggccacgctccgacacccactcactcccaccttctctgtgattactgtgctcctcctcttcggggtggctgctggctccatctgagggtacagcagtgggtgcagccaatcggtgaccccaaaatgctgggcatctgaggggacattgcagtgacaattgcaatagtgatggcaacaggataggtgtgactagggtcagaagggaggcactcatcagtcctcagatggggatggggatgctgaggtgatggggtgggactgagagtaaggacagtggggacagctcacaattcagaagggtggagaatgggggcaaggagccgtgccctccctggggctgggcctgtgtctccggcctgagacctgggtgggaccttgcacctctgctccgcctctgccagctgcagtcccagaaaactgcccatcagcttccaaattcttctccaactgcccctcactggccccccacgggcccacccctcgccttcgccacattctgttctgagccctccctccagcctaacacccccgttcacaagcatctcgcctactgtgccaccctccaccccctacccccataatagctgccaccatggccacacggggacagtctgggagatgctaagctgtctggccctcaggccaggtgctatcccaccccatcttctgagcatctgggccaaagattgctccgagctgaagtcagggctcgggacagggcccagccccttcccactcccaccagagcctcctggtgctgctcctgggctctggcctctggcctccctgagggaagaccacaggggtcctagggtgcccctggcctctggctcccggacttcggcttccaaggcaacccatcttccatcctctggccacgccccagaccatgcctctctaaagatagctagacgcaggccaggcctccccggagcccccacgcaggccctgaaattacagccctggtggcccggaggggagagatgctgtgtgattatgtcctcagaggaaggtcaaaaaaagctcctggcatggagagtgccagctttcaccagccacacctcggccatccagcactgggaagcttccagagagtggaggctccgctcactcagcaccagctcagctgccccagggcatgttggcacaagcctcctccataaccgccccaccccctgaacccagaggtccccgctgagcatgagcttcatgccgcttcgaggccgcaggtcatccagagacccttgagtggtgatggggttgcccactggtgtctgcccccgagggtgccgacactgggaatggacgaagcccacaggctcggagtgaggcccactcaaggccataaacttggggccgctcttgctcaagaggtaacctcgatgtgtgagtgacaggtccctggatgggaatttgccctggaagctgaggctctgcaagagctactccccaatgacaggcggcctcagggcactgcctcctcctctagaagctctccctgccccccagtcttgtacgggcacatagcacttgtcacctccttgcttcttgagggtcttgctgatggtccagggggtgggagtgctgcctgtctgcctcgcccactgcagctctctgtcccagctctgtcggctctccctctgtctctccgtcccatccccaagacaggcatgggcccttctgttcacaccatcagaatggaagggtggggaggttcgtgtccaggcagaagggttcgagaagcagccacccacagagaagagggcccactggacacacttggggagcagggcagagggagcccggggcccagttcttgtttccagaccctggagaatcatggaacaagcagcccacctctgtaggggacccctgcataagaggccacctcccaggctcctaggctctgccctctaggactcacaccacccgccagtatttcatgcccaaatgggaccagagagctcacagcctgccctctgggcgcccccaccctgcttctctcctgggcctccctgctgtagctttgaagacagggcacaaacagctgcaagccagctgtgggggacaggctgcagctgactccaggtcctcttccccacactggccaaggagatggcagctggcttagatccctgcgccctgcctcccctcctcccagcccccttcttccgtggccctctccctccctcagacatgtccttgtcccatccttccgtcccatggctgccgccccacctgctaccttccagcagccgtcctgggcgctgtcccaggcaggctggggtggcagctgcctgatgaggcctagaccagagttaggctcagagcagggagaccacagtgtggcctggggccctgtgcaggggcaactgccagggcaggacagctttccctgcagggaagcctgagcaggctgcccagggctgccctccccacgcagctgagggggttgggctccttgtcaggtggagagagctgagctctcggctccatccggcaggagaaggggtctcccgggctgggatgcaaggcaaggctggtgccagcaggaccttctggccctctacagccttttgggggaagcatcccagctagggcctagggggcctgtgcagtggcatcccagggtcacatacaggccgtgctggaaggggccgggttctgcttcccccacctcctgctccctgtctgccgcgggttcctggggagctaagacagctgtgtgtccgcctcctccccaggatccctgagggcctcaggaaatgcctgctcttccttcctgccttgcgccccccgtgcctgccttccccctgcttccccctgcctcctcccagccctgagaggccagaagggcagaaggctgcccgcccgccagctctgctcgctagcaaggaagcactgttcctagagcacttcagctgggatcaaagtaccttctgcgctgcagagagagcccaggcctgaggaggggggagtgggagggggagcagaagggggaggccctaggactgaggtactgcctgtctggtctgggagtggcccccaaattagagggccaggccgagtgactcagtgggccctagccaggccgagtgactcggtgggccccgggccgggcgtgcagttatggcttattgcagactgcaaaccacagatacaaaaaccttccaggtacaaggaccgtatttatatgagtattgcccccagaagcagcccccaacttcaggtaagagctgcaaggtgcatgcataatgtgtctcccccaagcagggtgtcgcctcatcgccacttccaagcccccatccaggaacatgcctggctgagacctgagggtgaggtcggtgcagggccggactgcagcgccgcctggctcccctgtgtctccccacacccccccgcacgtgtgctcttccttccaccggcaacttccctcttccctactggtctgctccaggtcacctcctccaggtagccctcccgagcctctggcactgtgcatggccctgcgcccccacggtattcagagctgtttcacccccactgggactcctggaggctgaggccctgagtgacagctcctgggttctcagtccccaagcagtgcaggaaggtactgggtaccagcacctcgggcagcaggcatgccttgagtgggtttctccttttttctgaaacggctttactgagagtggctgtgcttaccacacgatttgcgcattgagcacgtacaaggcaagggcttttatatggtctattcacagaactgtgcaaccatcactcagtcgattgtagaacattttcatcacctcaaaaagaaaacccatacctttaggtaccacccctctagcacccactgcccacaaatccgctttctgtccccacagatgagcctagtgtggacatttcaaatgaatggaaccagaggctctgcggccttttgcgactggctgctgtcactgagcggaatgtttccaaatgcttctctctccacccagactgctagtcaggcttcgctgcctgtcccgctctctaccgacatatttctccacgaatgagttggcagtgggggagggaaagagggtgggacagagatgagaccaggctgccaagagtcggacgctgaggctgggcaaaaggtaaaacacacaaacctgccgaaagacaagccatctcctttgtctggaaagggcatatgtggtctccaatctcctcattccaaccatgaaatcaagagagaaccagggttaccagcctggcccctggtttcccacgtctctcttctccctggcccagtctagaagcttcttgcaggcaggtaccacagtttggtcaaggtgccatgcgtcccaggtcctagccaggccctgggctgccgctggtgaacaggaagggggtctgtgccctgccatgcccccaggtagagctcccctgggagcatcctccctggcctgggacctcccagaccccaccccccggttgagtgatggcactgccaggggttgaagaccctcagccctcgacgttgtcctctctccattggatgccgcctctctctagccacccctctctccctctctgccccttcgagctttttctctcaatatgcaattttctcttttggtcttccgcactcttggcccccagttctattgcagatctgtttctcactccatctaaactcttacccctgtgtctcaggagctgctcttgctgagggaagaaggggacactacgggacaggggggcagtgtcgtactaaggacctgggctctagccactggaggaactggactcatttgggccctcaggaagcggctgagtcttggtggggtaacccggttagcccccgtaagtgaccagcacagggctgagcccagaggaagtggccacccacagagtggttctcatgtccgaggggacctgcagggattgagcaagaagactgactcgctggatccttcgtctctgaatcagttcagggcaggcaagctggggagccccctgccccgtcctgccaccaccagccggatcgggccctctttttaagggaagaaagtctggagtggaagggagggcacagggcgccaggagcctacatgaagtccttccagaaatccacaacagctacctctctgatcctggagaaaccacctccttgcttaggcccaagcaggttcctggcaggctcaggaccaaattccaggggccactcatgggcctagcagcccaaggccgcctccccctcgtctttcttccatctctctttcctctgcctggcgagatgccagccagcacctcagtgtccccatctgggcagtggaaagtttgactctctgggtccttgtttgagtgagtgcgagtgtgtccgttcctttgctgtctgccccaggcgggggagggggggggaggtggtgggggcgagggggcgggggctcagctagtccagccgtctacaagaaaattgctccctttgaagctgccaggggggccgggaagcctgccccctcctgctcgcccgccctctccgccccaccagccccctccctcctttcctccctccccgccctctccccgctgtcccctccccgtcggcccgcctgcccagcctttagcctcccgcccgccgcctctgtctccctctctccacaaactgcccaggagtgagtagctgctttcggtccgccggacacaccggacagatagacgtgcggacggcccaccaccccagcccgccaactagtcagcctgcgcctggcgcctcccctctccaggtagggctggcttcaagctgcctcctcagcaacccagagatgcccctggctctgctgcctccgctgtcccaagccctggtcctgctgtccccagtgccgcgagggtgtccacagatttccccggtgctctctgtaggctgctgatccacgccccttcatcgccaccctgcggcccccttggtccctgtcaggcttctgcctcgtctcgccgccctccaggcacctttccctcaccccttcctctccctctcccttctgaccttgctctgcttcatccacctcttgtctctctgcctcccgctcggggtccgtcttcttggctaccaccctagagcgtggctgggtgactggtaccccagctttgccaatggccctgtttcatcattgcaagtcccaggcgcatgctccactccctcagcctcgctctgcccaggcgcctccttgctccagggcttggcgcctggcccgggttgggtcggatcggggaggaccgcccagcgcccaccgagctcagcacccaggagcagtcctccgctgcactgcctgaggccagtccttggcatgggctgaaagacttagtttcccaggcacaccccaggcaccctgcccagatgttcctcgctcgctcacccccaggttaatgctctgcctctacatcctctgtgagaagtctgggtcctgggagccctggctgcaagggccctgactgggggtgcctgggtggctcagccctgtctgtttccaggacccccttggactgggactcagaatgggtgtggaggggaaggagagaaaatcaggcaactgtgccatgctccccagggcggacctggcttggggtcccagaggggcctgccaagggacccaggagagggagcgagagagtgccctggaaggcccacggaggggagcgccccctcactgctccatgggcggggctgggtgcctgagcgcctgctgagcagagcagggggcccagggatctgcagggcacagggtacatcagtctccagtggtctgtcttggtgggcaggcctctctcctgctgtcctggctgccagactgctcaggtcccatcctcagggggtcctgtttctgggccctcgcccctccctggcctgccagctctctgccctatagcaactaattggaactgagacaagctggagatgctcagcccccctgcccccgtgccagaaaggctcccggggaccagcgcccaggggtgcgggtgagcacctcctggtgacacccagccgccggtgccagccgcaccccaggagagctggtgtatgagcatggatgtcttggtgcggagcatgcccatgtatggccactgtgggccagcatggtgagcctttgagggcaagcccgtgtgggtatattgaaaggaagatgcagggctgcctccaagccaccagggctgggcggtgggagcaggttgcgagccagggagcagagagggctcccatggcaagctggccagctgtgggtggcagccctggcctccctggcccaccttcaagccccaaggacccgtacggcagtgggcattaaccctaccaacgcatagatggggagtctgggaaaggaaggggggtgtttccaaggcaagaatgagtttcctgtctttagcaacattccagagtcactcaaacaaagctatagcgtgtcccttccagtgacagcgccaagtccccagaggaggggtttgtaatgagttcacacttgacagttagcactcagagccttcagcaagggcttctgagtccttgccaccccgtatagaggtgggatgaggacctccccacctgccgtctcctgtgcttcccgggcccaccccccaccccccaccccccagcatctccagcctgcccgggagtcacatgtcctcggcccacagaatccccagcacacgccccacccacaggcctagccccagccctggggtccctggcaccccacctgccagggcccctcccctgccttgctcaccccccaacacccctgcttgtcggaaatgtcttcccatgcccaccacgaccccctcccactcatctgtgggccggagagcttggtccctgccgcacgttgcccccctagcatccaggcccaccaccgagcccccgacaggcctgggagccccactggtgggtggggacccaccagctgggggtcttgctcacaccgaggggctgggggtggcggtggctttcccagggcaccctgccttgggctgcaggccgctgggtgggcaccggctccctcggaaggcagcgcaacccgggatcctgccggccctggcccccaccctgccgaccgggcctggggcgatcagtgccccagctcctgtcctcttctgctcagatgctgggttgggagatcaggggccacagctcggccactcagagccctttccgcaagtcttagagggaccagctgtggggtgtgtgcagaggggctgcgctgtggggagggcgcatggctcagtcctcctggcctgaggcccgcctagcctaagtggcctccaggacccatggccaggcccttctgcagccttccagaaagaaccagcttcccagggttccctggggaaggcctggggccacctcctctggaggggtggggcctgtgcttcattcctccttccccaggtccccttccaggccagaagatcccctccaccacttgaatcccacagccagaagccccttctgggactctagactcctgggaaccatcccagctgcccccttcgctgtttcgctgtttgccttcttcccctgccccgtcatggctctaggtcagagcagcctctggggtggctatggaggggccaccagccttggctcttccgaggactgcagaaccctcccactcccagcttcccacctgcgcagctctgatcccagccagcccaaggggcagggtcaggtcccggctccctggcaggcctggtgaaggtgctgcccattcccatgaggctcatctctgaggcttaggggcctggggctctagccagccttcttgcatggaactctcctggtccactgcatcttaagcctgagctccacttaaacactggcctgagataagctggaggaccaggggcccaacggactctgtgggcctcttgaacttgcctctgctggccatcccagtcctgtttggtccctgaggtgttcagatgggccaaggggagcatggcgggcagactcctgggtggccagaagattagaaggcagccctgtccctggaggcaggggaagtctgggaagccagtgtgacttctatcctctggaagtctgagtccctgcttggccttgactgccatcccatggttcttggaggctgccctcatgcaaagagacacacacccatgggagcccagcagtcccaggagcctgaagctaagcaggctgtgggccaccctggctggctgaaggaggctaatcccagcccagcctgagcccccggcagagagcgggttgcggcagggaggggctgcaggaaaccttcccctcccctcctggccttggtgggcctgtaccagggagggagggaggcagggccccaggctctggggggcaggccgggaacaccttccctggggccctgaagtgctcgcctggggagacgatggcttttccaggagactccctgcagacagaggcagaggtgagaggctgggcgggggctgccctgctggctgtgttggggctgaggaggggcttctggatctgtgggccatagggagctactgatggtcctcagaagggccatgcttccaggggagccccctgcacagccccgagagtgtgaagcgtgtcagctttggggcctgtggcactgtgtgcattgggagagggtgggtccagacatgggggcaaggacacagacggacagacagacagtgtgtgcagccccagctctgctgtttcctcaccgtgtggccttgggcaagagtttggggccaacttcctgagcctcagtttaccccttcatcaagttctaagagcattgcttccttcttatagtcaacgggggacggcaggatgctaagtaaagaaatcacatgagtcccctgctctgcctctgagaggtgacagcatcctcccttttccttggagactctagcaggaggccccggatctcttcggagagtgggagggggcagcagtagtccgtgtgcagaggaccaggagcgcacagtgggaagggctgagtcccgcactccgccgactgtggggacaggctggaccttgacatgggcgccacaggctgcaaagggctggcacagagaggtgggaggtggctgggcgcatcaagggagaactccacccttgtcgccaccctgccagaaaacctctggaaaggatttgagcagcagatgagccggggtttcccagcccctccacacgtggctgcaaggggagcagacgcccaagcgtggctgcctgaagggcatgctccggcaacggcaggggcttggaatgtggcacaaggtccacccctccccactccagcccccagcccctcaggcagccactcccacagatgaacgcacacgccgggctttggcaaggccagggagggtacacatcccctctctggttgatgcccaagtacaggctggagccatcggcggggagggactggtggactggggcctgggagagtggcagggggcaggccgggtgtcagcgggggcacaagcaccaggctgctggttgaaactgggcccaaaaggctttggaggccagaggggaggggaggaaggacacagtcccggggaccccgcagggctgcgtggaaggtggcacatgtgtcagagttcaggtcgggttgctcaggggggcagacgcccagggctgaggctgcggagacagcatccggcgtctgccacttggcagctgtgagccacaccatctgcaggcgagctcccagggcccgccagacctcaagccctgctcccgccgcccttggcctggcctgaatgcctggcacggaccctccatgttctcagaggctgccaacgcatcttgtttggctgtgacctcgagcaatccagtgcagaggactgcgctagctttcagaggggcagacaaggagggccctattggggtggtggcggaggctccaggaagcccagcctcctccctcactcacacctgcggtcgccaaacctggggcttatgccattgccgcccctgtcctttgctctaaagagatggtatccagggagctcagggcacactttggtggggcttgaaaccctccctgaagtccctgaagacacacccagagaggccaatgaagggaaactgaggcccagaggcctcagttgtggtggtggagagttgaggactggagggacttgctgtgggtctcacaggatctgactatggggtattcctgcttcctgggctggggtccccgcctgccttatctatgtgtggatatatgtgtatgtatgtgtatatgtatacatatgtatatgtgaatgtgtgtatgcatgtgtgtatagatgtgtgcatgtatgtgtgtacatatgtgtatgcgtgtatacaggtgtatatgtgcaggtatgtatgtatgtatgtgtgcatgtatgcatgtgtgtgtgtgtgtacgtgtgtataaatgtgtatgtgtgcgtgtgtgtgcatgtgtgtgcatgtgtgtatgtgtgcatgtgtgcatgtgtgtatacatgcatgcatgtgcgcatgtggatgtacatgtgcatgtatgtgtatagatgtgtgcatgagtgtgtgtgcatctgtgtatatatgtgtgtatatgtgtatcatatgtgtatgtgaatgtgtatacatgggtatgcatgtgtgagtgtctaggtgtgtgcatgtatatgtgtgtacatgtgtgtataggtgtgtgcacgtatatgtgtggatgtgtgcatgtatgtggatgcatgtggatgtgtgtacatatgtgttttgtataggtgtgtgcatgtgtgtgtgcacgtgtgtacatatgtgttttgtataggtgtgtgcgtgtgcacgtgtgtgtatgtgagcgtgtatgtgtgcatctgtgtgtgtgtttgtgtgtgtatgtgtgtacgtgtgtgtgtgtgcatgttctggcaggagggaggggcttggtgtgaggtggtggggagaaggcaggggccaggctttgggaggacagctgagcctatactgccaggacctcccaaactgccacccccagtcttgggcattcaggctctcacaggcccagagacatggctggagccctgtggctgaggagcacagctgagagctcaggcggggcctggaggcgccaaagctgagttccaagtcaggctgagtgacttgggagaaatcagagcctctctctcggccttagcttttgtgtccataaaatggggatactcatcaggccagctccaggggatcctatccttccccccaggctcccctggctccctctgacttcatgggccccttgctgcctcctgtgggctcagacacggagcctgccccttcctcgggagaggtctcagttttgtgccagttctttgaggggaaatgagggatgtgccgggaagcctgcccggcccccgcccctccagcctgcccactgcttgggcacagccatgagccatggaaaaccagccaaaccttgtccttctgcctctgtcacggggcccgggtgtatgggccttccagccctcagcctccctccccgctctgagggaacctcttccccttgcccctttctcagtctcttggagaccccccagacatcctactgtatcaggcagcctgcctccagagccctcgttgccccacagctggtcccgggaacccgcctgagaccccgatggccagtcttgccgtgactggcctgccctgtgcctgtgccccctgccctggtggagggcccgattccctaacaggagggcctgcagggaagtcccagctcctggggagaccccttgccccggggcaggagtccctgtagagtcctcctccaggccaatgcgtgggtcctggggggctccaagctggccatggtcagatggtcctctgtcccctcggccttccccagcccctccccacagcctcccgtaggcccagccggaccaccccaaccctacctgtccaggtggactgcccaccctggagcttgccagggctctggcggggtgtcccagccctgactcactctccctgggaggtagcggctttggcaggggcatcggcaaggaggggcagggcagtctcctccctcccccactccatcttgctctcctgcttccaccctgcccttcctgttctctcccactgctcctcctcctcctcctccttctgcccccgggtgtccactggcactgggagagggtcctacagcggcagcaggcatcggaggccctgccctgccctggaggaagggaaacaccatccaggtaggtgagtgttgagccttctccctacttgggggccaagaccctccgggcggttcccctaggttctgctgggccggcctgaggctggcaggccctgggctgcaactgtgggatctcaaggctcaaaagaatgagggaggctcggtgctgccccagcaggggcctcctggtgaccccaggggtcagcatgaagtccagctccacatgagggggaagctgagctaagccttgggctccgactcccactttgcagtgtggcccagggcctgtgggctcaggagggctccggggctggctgcggaaaggccactccacaggcctggcagccgctatagccacagcctcaccacaggcccctctgtccacaggtgtgggagggcgcatgggtggcttctaggggggatgccaatgcaggggggacgcgtgccagcagatgctccctggagcacccgaggagctgcatgggggcgacaggacaggcctccatcccaaccctctcctgggcttgtgctcagacccaacctggccctgaagtggcctcaggcccccggcccgctggtagcaaggactccaaagcggcagccccgggcagccagcccagcccccagggcaactggggaagcatcgggcagggcggggctgctcatagggtgctggcctgggggcagagcccccacctccccacggcctccttagacccctgcaaccagcagctgggcttagggggctcacctcgctctgctggagccccagacagcccctccccagctagtactggccctaagtgagggtctcctgggcgtgcgactgcttcaggtctgccagaggcccctgctgcccagctgggctccccatctccagatgcaccgagggccaccccaggctgggtggcaagcagggcaggcatgtttattcccacttaacagatggggaaggtgaggctgggatgagacctgggcctttgctggagagtcagggtggatgaagtggtgagagaggcagggctccagcctcttcctgtagggcacattcccggctgcctctggacgggagaccgtgtctgatgaggagggaggaggcaagcagaggtgggtgctgggggcaggctcgggcagggctgcttcgcctccactcccactcgccgcctcggcctggggggcctcaggcaagcctgaccctgccctgccaccctggcggcagcctgctcccctggggggcctctctgggctgccgaggctgtgggcagggaggaagggtgcgagcagatctgggagctccagggctgtttgggccaaggcggtgtgggcggggggctggggcgggtggtccagaggaggaagccaaggcccaggggcagtgttgggggcgccacggcctccacctcgggggcctccactcagtgctgcctcagccaactttacccacggcctccaaggataccccctctttctccgccctgcctccctaccttggccttagagggtctctgagaaacgtgggcagggtggagggaggaagcaactcagagtcgccgcactcaactaacttcatccacgctgccctgagcccagaactcaaaggaaggatcggcccgggtaggaggccacagtgatgtccccaaaagtgaattcttcaaagcccttgagggccaatggctaggattcctcctccacctcctccacgcagcctcatggacgcccccgccctaaagcaggcttctggcagactcagaggcgtgggggcctgcagacttgctgatgaggagacatttcatcgcctgattaagccaagtcctgtccgggatggggaggggggtagtggaagcagtgaagggagtggagtggagggggcaccctccttgccagcagcatccactcccttcctgcctggagccctctgcccacactccgccctctccgcctcccgctccagggtctggccgtccctggtgagggatgggaacgcagtgccaccacacacgcggaacaccagcccctggcatggagaagacaggtgggtgctggtgctgatgatcccctcgcctcttcccccaggtccatccgccatgtggcccctgtggcgcctcgtgtctctgctggccctgagccaggccctgccctttgagcagagaggcttctgggacttcaccctggacgatgggccattcatgatgaacgatgaggaagcttcgggcgctgacacctcgggcgtcctggacccggactctgtcacacccacctacagcgccatgtgtcctttcggctgccactgccacctgcgggtggttcagtgctccgacctgggtttgtccctgagtgatggggagcggggcatgcagggaggctcaggtgcagcctgagagccccttctgaaggggacacatgctggtcctgtgggacggtggcgagcatgatgtaagtgtaggaggggtccagccgtctggctgtgagctgtgcagtttgtgcccacttgtggtggcatccccgtgtgcccgtcagtgtccctgtgtgtgtgtccccggtcctccctaccagtggggctagtcggctggatggctccaagttcatgctggtgatggtggtggggcccctaggtctcgagttcatgctggtggtgggggtggggcccctaggtctcaagttcatgctggtgatgggggtggggcccctaggtctgaagtctgtgcccaaagagatctcccctgacaccacgctgctggacctgcagaacaacgacatctccgagctccgcaaggatgacttcaagggtctccagcacctctacgtaaggagctgggaggaaccagcaggcctacagcagagggcaggggtccgggtgggtgcatgtgcgtggacgtgtggggtatgagaggggttcggggactcgtggggcttcagggtgaagcctggagccagccgtgatgggagctcccgggtttgcggctcactcatgtgggtttgagcaaccacagctgcaggaccggatcgctcagttcggctcccttcgtggctgaaaacgtttcatcacgtccactcctcccagcaacagaggagaacggatttcattgtagccagtgtgcgtgtgaggaaactgaggcttggagcggcaaggcagtggtggcactgctggggctcaggaccgggcctgggtgctgcctcctgccctgcactctgctcacaagcatggactgaacctcctcgaggcccagtgggctggggaggcacaggaaggcaggagagaggggcgggtggggtggggagtctgtgccttcacctcctccgcccaccctgcttcaggccctcgtcctggtgaacaacaagatctccaagatccatgagaaggccttcagcccactgcggaagctgcagaagctctacatctccaagaaccacctggtggagatcccgcccaacctacccagctccctggtggagctccgcatccacgacaaccgcatccgcaaggtgcccaagggagtgttcagcgggctccggaacatgaactgcatcggtgagctgagggcctcccagaacattccagagccttgtctcgaggcatggggaagggagaccaagggatacctttagaggctcagttcaagaaagagtatggtgagaacggtcaaaagaaaatccatggatttcttggcaaatcctccatgcaggcgatcaccacggctaaagagaagactgggccagaggggccgggtggcttccgggagccccatcttcatctctggcactcctccctttcctcttgctgcccctggagctagcagtcctggggctagcagtcctgaacagctaggagtttgcaattagcccggtaaattagcagaactgctttcaggagacgggagcagccggcaggtagcagggcccaccacactggcccggaagtgacaggacccagggctgtgcagggaccaccaggctcccgggctaatgaggtctctcccctagagatgggcgggaacccactggagaacagtggctttgaacctggagccttcgatggcctgaagctcaactacctgcgcatctcagaggccaagctgactggcatccccaaaggtaggaagcccactcttcctgcacgcctgcctgcctcacccccaacagcacagatggccagggtgggggctctggatgggcccgatctactcagggaaaggctcaacagtcccctcccgccacctggggcagagctagggcccctgccctcagcacctgcattctcccctgtgccctcttctcctggcagacctccctgagaccctgaatgaactccacctagaccacaacaaaatccaggccatcgaactggaggacctgcttcgctactccaagctgtacaggtgaggccagcagggcaccgcccaagggtgatgccagagtccctcagtgctgtgtggcccctcgcgcccagccccccatccttacctccagcctttgagtccgtgtcattctcccgctcacaggctgggcctaggccacaaccagatcaggatgatcgagaacgggagcctgagcttcctgcccaccctccgggagctccacttggacaacaacaagttggccagggtgccctcagggctcccagacctcaagctcctccaggtgagagctgggcatgcacagccaggttccctaaggctgggctgggggaggcgtgtgtgtccccgggcagtccctcagtcccctggccctccttcccgaccggctctgggcatctgcaagggagcggtcctgatgctcccagctggtgctgaggaggcagggagcaggggctccatggtggataccgagcaaggcagcctggtagctcttggacccgagggtctccaggtgggtcggacaccagaaagatgtggcagagtccagggagtcgagaaactgtgggcgtgggagtgcacagatctgtgccaagacagtgaccgcccagggcaggaagtaggctgacgagggggagcagggtcttgcctgggattctatcgggagcttccatccctggcctggcccgcaaccaggtgggtgatcttggtcttgcccagccctgctccatccacaagtgtttggagcacccccatccgcaccagctgcgagccagcaccgcgcaggccatgcccatgctgggccgagtgcgccctctagtggccattgtcatgttcaccagcactgggctcccagcccaacccagcaggcgcctcgcctgcccacctccgctcctcccagagacagcaagacggtggctccagagagttggaggggctgctagagggcgagctcctctgctgactggaagaaagaggagggcatcccaagggctctttctcctctcatgccccatggagtgtgagggtgctcccccgaggctcaggccacctttcctccacctcacaccaccaaacacacctctaccccagccccgcccccacatgtcctcaacctgacccacctgagaccctcatccttgtccctggtcacatccagtgccttaatcctggctgacacccacacaaataacacgcccatgccttggtttgctcctcccaacaacggggagcctctggtgtggcccttgaagtagggtgcagaggcaacagcaaaatgcctcctggaggcagcgggcttggcgtggagggagggaggcctgccgtgacccggcctctctgccttcaggtggtctatctgcactccaacaacatcaccaaagtgggtgtcaacgacttctgtcccatgggcttcggggtgaagcgggcctactacaacggcatcagcctcttcaacaaccccgtgccctactgggaggtgcagccggccactttccgctgcgtcactgaccgcctggccatccagtttggcaactacaaaaagtagaggcagctgcagccaccgcggggcctcagtgggggtctctggggaacacagccagacatcctgatggggaggcagagccaggaagctaagccagggcccagctgcgtccaacccagccccccacctcgggtccctgaccccagctcgatgccccatcaccgcctctccctggctcccaagggtgcaggtgggcgcaaggcccggcccccatcacatgttcccttggcctcagagctgcccctgctctcccaccacagccacccagaggcaccccatgaagcttttttctcgttcactcccaaacccaagtgtccaaggctccagtcctaggagaacagtccctgggtcagcagccaggaggcggtccataagaatggggacagtgggctctgccagggctgccgcacctgtccagacacacatgttctgttcctcctcctcatgcatttccagcctttcaaccctccccgactctgcggctcccctcagcccccttgcaagttcatggcctgtccctcccagacccctgctccactggcccttcgaccagtcctcccttctgttctctctttccccgtccttcctctctctctctctctctctctctctctctttctgtgtgtgtgtgtgtgtgtgtgtgtgtgtgtgtgtgtgtgtgtgtcttgtgcttcctcagacctttctcgcttctgagcttggtggcctgttccctccatctctccgaacctggcttcgcctgtccctttcactccacaccctctggccttctgccttgagctgggactgctttctgtctgtccggcctgcacccagcccctgcccacaaaaccccagggacagcagtctccccagcctgccctgctcaggccttgcccccaaacctgtactgtcccggaggaggttgggaggtggaggcccagcatcccgcgcagatgacaccatcaaccgccagagtcccagacaccggttttcctagaagcccctcacccccactggcccactggtggctaggtctccccttatccttctggtccagcgcaaggaggggctgcttctgaggtcggtggctgtctttccattaaagaaacaccgtgcaacgtggctccgtgcgctgctcctgtggcggcctggcctctccgtgcccctcctggcccttgggctccttgccctcagaagaggggccccgtcaccctcagaagaggggccccgtcaccctcaggtctgggctagcccggactagggaggtttcccctcccttctagacacttccatggccccagctgtcctgagacgcggctccagaatccaaccaggcctgaatggcacctgccctctcagcgtggagcgtttgccaagagcacgccgactgcagggcgccaggctagagcctggaaatctaagcggggcccggcctgcccagctccatggagtctagggttcacaacgaggcaccgccaaaacccagggggtgacacaggagggaaggggcccaatggagccagggcagggtgctgtgtgcacccacttgcactggcctggccttggctcccctgccagccccctggcaggtgacactgtgtgtaggcagagccgagcctgggctgcaaggcattcccacacacgcagcatccagagagaggatccaggtcagggccgggaaagcctgcatgctggggacacaggtcgtcctggaaaggacagcttggagggggacagtccccagagcaacgctaccgcctgtgactttccttcggccctgcacgaagagcctcagagcaggtggcgggacctggggcttccctgggcagcccaggctcccaacggaaatagagtgggcagggcccgcgtgaatggcagcctggcactgcgtgttggctcctcacacataactgcgtctttatggctggactggcactggcgcactggcatccccaggtttctcctttctgggataggaggtgccacacagtgtggtggcccagtgatagaaagtcaccatcagcatcacagcactattctgggccatgtgctctacggcccggcaatgtctgctgagctgggcaggcatggtgcaagggaactgggcaggggccgggagtcaaggcttcgggcaagtcccctcgctggctgggaggaggggcagccagcgccacggcctggcagagatggaaagatggggcttccgcccattcatctgtgagcgggtcttggggcattggctctgtgttcagtgggtccaacacagcccccgtgaatctgtccactcttcctgcctcgctcccatccttcctgtgcctcctttcctctctgtctgcctctcatttcatgcaccttcatcacacctgtcctctgcgtgtcccagctcagggatgcagtgtgggtggaggacaagctagtgggatgagtgtgatatgggtggtcagtgcagaggaaggcatcctgcaggctgcgtgcttagcccacacagcagggggtgccctgcaggcagcacacactctgcctggactagagtgccaagcccccgaggcaggagcccagagctggacagggtcacagcctgcaagggcttctgggtcgtggtggaaggtgagctccatcctcaaagcagttggtcctgaccacagtgtgaagatgaatcacatagcctcactctaccgccaagtgtgggaaaaactattagctaatactagccaaggtgagactgatttgggcttaaaaaagaaaatggctaggcgtggtggctcacggctgtcatctcagcactttgggaggccaaggcaggaagattgcttgaggccaggagtccaagaccagcctaggcaacatagtgagaccccatctctaaaaaagaaaaaactaaaaaattagctaggcattgtggcacacgccagtggtcccagctgctcaggaggctgaggttggaagatcatttgtgccggggaggttctcccggcaagctgccaatcccccacatttacttgcaagtggcttcgaaagtaggactgtgctcagggccccagctgtggcataggaaggcctagggtggacaacggctgggctgcaagttccagccgatctttgcttgagtagggtcccctgaacttggtgacagattgggtgtagtgtgagaacggggttggttgtgatgctccgtggcctggagaggggaaggggaccctgaggaccaccacctgacggccaggagcattccggagctgctggaaggcagcaggcgtgggcttacacacgtacacacacacatgcacgaacacacgtgcacacgcacacaaatgcgtacacaaacacacacgcacacatgcacacttgaacacacaaacacaagcacacagaaacaaacatatgccgcacaaacacatgtgcacacaaacacacacagcaatgcaggtcacaaagccgcttcctcggggagtggctgtggagggcacagggccgccgtggggccgtttctcagcatttgctgcaggtcaggtgccttctgggcacagcagggcccagcgggagcctaagccgaatccactgctacggtttagacgagtccgggcttgtcaaaggggcagcgagccagaccttggcaggctgggcccacgatgcgggcaggacccctgagggacacgacccctccttggagggctgcaggggcaggtggcaggcctgggagccaagtcagaggggctgccctgaggacttggcagtggcctggtctccaggctctgctcccacaggctccagctctagtctcaggaggcagggaccacaggaagaggccaagaccctgcctgccactctgaacaggcagggcagggcaccatcgccagcagagagaccttgtctccctcagcttctgggagggcacagcctctctggcgccctggagaaccctgggcagcctgggtgctgaaaggccctgatgcctgctgcacaggggcagccagggcccaggcaggagtgcccaggggactgtgctggagctgcactggcaggagtcatgcccaaagagccatctctgtctctctctctcacacacacacacagacatactctcacactcacatactcacacacaaacacacactcgcactcacactcacacacactcccactcacacatgctcacactcacacacactcaaactcatactctcactcacacacactcacacactcacacaatcacactcacactcactcacacactcacactcacatattcacactcacacactctcacactcacttgctctcatgcacactcacaccccacacacacccactctctcacacacactcactcccactcacacacactctcacacacccacacacgtgctcacatacactcatgcccacatccactcactcacacccactcacacactcacactcacacccccacacactcacacacacacactctgcatcgccagccagctttccagaaccaccaggcgtggatgtactcaagccaagcagcccaagaagcctcagttgtgctgtggacagggctctgccgagctggagctcctcggtggcccagctggggcttggatgagtggcccgaggccactgtcatggataaccacaaaccgggtggctcaccacagaggacatggaccctctcccagtcctggaggccagaagtccaaatccaggtgtctcagggccacactccccccagaagctctagggaaggcttcttcctgcctctcccagccccggaaggctccaggcgtcctggacttgtggccacctcactccactttgcctctgcaatcacatggcttcttgtgggggggggggtacatgtgtgtgtatatgtgcaatgtgtgtgtatgtgtgtgtttctgtgagtgtatgtgtgggtatgcgtgtgcatatgtgtgtgggtgtgtatgagcatgttcgtgtgtatgtatgtgtgggtgactgtgtatgtgtggggtgtctgcatgtgtatgtgtgcaatgtgtgtgtatatgtttctgtgtgtgtatgagtgtgtcttgtgtgtgcatgtgtatgactgtgtgcatatgtgaatgtgtgtctgtgacgatgtgtgtgtatgtgggggtgtgcgtatgtgtgcatgtgtgtgtttctgtgtgtgtctctgtgcatggatgtgagtgtgggcatgtgtgtgtgtttctgtgtgtgtgtctgtgcatggatgtgagtgtgagcgtgtgtgtgtttctgtgtgtgtgtgtctccgtgcatggatgtgagtgtgagcatgtgtgtgtgtgcatggatgtgtgagcgtgtgtgtgtttctgtgtgtgtgtgtctctgtgcatggatgtgagtgtgagcatgtgtgtgtctctgtgcatggatgtgagtgtgagcgtgtgtgtgtgtttctgtgtgtgtgtgtctgtgcatggatgagagtgtgagcgtgtgtgtgtgtttctgtgtgtgtgtgtctccgtgcatggatgtgagtgtgagcatgtgtgtgtgtggcggggggggataacccaggataacccacatctcaagattcttcacttgatggcatctgcaaagaccctatttccaaataaggctgcattccggttccgggggttgggacatggacacatcggtggggacatttttagcctgcccctgggctgcaagtggacacgggctttgcccctgaggccttggggaaggggctgggacctcagccagggagacagtgggcatgagaagacgggatgggggccccaggcccagccaaaggggtcctcacttcagagctggccaaggagctgctgtcccaacagtggcaggagggaacctgggcaaggagggggcatggcccagaggcctgggagaggacggacctggtgactgggtaggggccaaggagccaggagagaaagcagttgtgggaggggagcgggactgaaggggctggaggcaggtggagagagagaggggtgagagtggggatgaggcggccaggtggggcggtgggcagccgctgagagcagggtgctctctgtggcttttgtttcccaggcagtcgtcggcaatgtgggagagtggggtggggacggaggcctggcgtgccctaaggaggcaggtccagggcatggtgggacaggctggcttgggacctgggagggagctgggaagcagagtggtctgggcctccctgggtttggctccctaagtactcccagtgcagaggacaggacttggtgtatgggagaactttctagcaaagctcccacctctttactgatggaggacccaagaggggctggccggtgagcaaggatcaccagtgacactggcagcatttgcctggcactcaggtgtcctcattcccaggcctgggccctccctctcagcctcagggctctgggctgggaaccaacagacacaaaccaaggagaaaggaccatccccttacctggccattagctgtttaggggccacaatttgctgaggactagggacttccatgacactttgttccttggccatctgaccttggcctcagtgggactcatcacaaaggtaggcaccatggccaactcttggctggattagccatgagcagtgccctgggggcccgggggaggaggcaaagtggtggggcaggtagcccctgcctcagattttctcccctgaacttgcttcttccccctggccagacagggcctgtgcagagtctggggtcagagaatagggaggggagatgcataaacacgcaacccaggcagcagctgctccaagctcagggagattcccccatgtggatagcagccatcagttaaatgaacagcctccatccctcagcatgttccctggtccccgagggaagacagtgacgcagcccaaagggactcttctctttgcttgtcagctctcacagccactcctaagcctttaagtgtgggtctccccagccccacacctgccctcccagagctgcccacacatgtctgctaagaggtgcttgtcttcagccgggacccaacccttgcccaagggatgctcctgctgggggccacgaaaggaggccagctcagcagcctgcttctgcctttgctcactccagagcagggcccttgggcctgggatggaaggacatgaccccagggagcctgccacagtgtgggaggccaagaaggaacgtggcctgaatgcgctggggaaaggagctcctctgccctcctgtggtgcctgagggcatgggggcagctggcctcccggccaggggccaaagtccagcttacaacctgctccgggtgggatccagtgccctctgggcctccacttccccatctggaatgtgggctagtaagaggaacgactccaagatggcagggctctggcgaaatggccagaacttagctcatgataagtttccagcatcattggggcttgcttcagtcttgatttttcccattcggggccatgggaagtcacaggctgtgtgtgtgtgagaagggggtgtccccatggcggctctgggcccggaggagcacacgccccaggctcaggaaaagctgcctcagagttggagtggaaggggactgcgggagtgtgcaaatgaatatgtgtgagagtgtgagtggggagtgtgtgtgtgagtgtgactgtgagtaactgtgtgtgagtgtgtgtgtatgtatgtgcccatgtgtgtgctcactgggtaagtgtgtgagttgtgtaggtgtgagagcatgtaaatatgtgtgaaccattgtgtaactgtgtgggccaccgagcttgtgtgggtgagggtgagtgagcacatatgactgtgaggatgtgtctgcgtgagattgtgagtgtgtgcatgagtgtgtgagtgtgtgtttgtgtaagtaggtgagtgagcatgagttcatgcatatgagcaggtgtgagtatgtgtgcgtgcatgtgagtgggtgtgagtaagcatgtgtgagcgcacacatgaccaggtgtatgagtgtgtgtgtgcgtgcgtgcgcgaacctcagctttccacggcaccagctgcttcctgtggaagggaggggcagtctgtgggggttgtgacggttccctggtctcaggggcagcagaagctttctgtccttttggtccctagcacagtggtgcctcctcaaagaggccttccctgagccgccagcagcctctttcatggctccccatcaatggggttccatagctccgaccccagcggcgtgagcacatttgccatccgacggccactccctgctttgtggtccctgctgtgtccccagtattcagctctggtctggcacacagcatgtccagggccctctttgtccaaggcaagaaagaatttgaggctgcgtccaggcctcttgcacctgcctcaggctcccgcccagagcctctacctgtgccccagcgagcattctctgctcgctgctcagaatgctcgcaaaggccggccctggggtcagaggcctccacagcccctggagctgggaagcctgggggtccaccggcaggcacgggggtctctttccaggtaggtgggaacgcgtgcttgtgggtgtggacaggtgtctgcactggggtttgtctgtgtgtctgtctccactcacaccggggatgtatgtgcccctgcgtgtctgtctctggtgcccacctgtgtgcagtctctgtgttctgcctaacggtggtgttcccgtgataaccgacggtgaggatctccggtaagcgccgcttcctctgggaagacgcatttggacgcccgtactctcaacaggtaatggagtttgcaggagaccaccaatgccttggagtccactgaggcaagacccaaggaccccacgctacacatcagccacccggctctgtgccccattttactgttggggagacgcacctagagggcagggtctggagaggtagtggcagcctcagtcgcaagctcagggtgctctctctgcactcacaggtgccatggtcccccagtttccatccccacccacccccactcggccagtgccctttgggggcaatgccaggccaggaagggcgggcaccctcgcgcgtcctggggacagaagggcgcgcaccgggcgcgtagctcctgagccccgaggcccctgcgccgcgcaccgccccccgcgcccgctccctcctccctccctcctcctcacccagctccctcccctcccccctccctccctccgcgctcagagctgcggttggagccgagcgcgccgcgtcgcccgccgccggtgcagagcgtggggagcactcggccgcagccctcgcccgccgcagagggtcgcgtcccgcgccgccggccaggccgccccgtgcccaggcctttccatccttggagcggatcgttgcccgcctgacgcccgcccgcagcgacagcgcccgccggagccgaggccgcggcggcggccgtgcccatgcccgggtaagtggtgctctgggcgcgcgggcgccgccggggtgggcgcgggcgcggcgcgggcacaaggcgcgggtggggatgggaggatgacccggcaggtggtgcggcggcaggtagggggacacgggtccccgcccgaggcacctgagccccgcgccgggcctgcgtgtccttgcggcactgcggccgcgcgtcaccccggggccccaggccggcgggcagcgccccgcaccctgcaccctgcgccccgcatcgcgcgcgcacgcgcatccgtgtctgaggaacaaggcccttgggggctgcgggccggggctcagggtgggcgcagccgggggcgcgggatctgggccgggagcccgccagtgcgcacgcaccttcccggagcctcgggcaccccctcccccccgcgccctcacactgtatcatccttcccctctcgccttcccgcaccgttccccgcacgcccacgcggctgcccagcagaccccaccgcggtcatgggcagtgcccacgagaagccgcccggggccgcacttaggtaacttctccatccctccaggaacggctgtctccccctcctcgcctgtgtgaccttggccagccagcttttcctgtggccgcctgcgttttctcacgggtgaaagctctggctttaagattctggaatttggaatggcaggtgcggcatctcccagagcctgagacgatgggcttctctctctgtgacctggtgtccttccttctgctggcccttctgggggttggtggctcagccagccggctgaggaggggtgggaggcagggcaggggcatggcgccggggcaggtcaggactggagggagtcttggagagcccgcggtgagggctccatgagggtttaggagagactgtggaaatgctccttcgctcactcaaggggcagggaagggaccagaattcctcaacgagatgcttgccatttcctggcgaggtcatataactttcaaagatgaagcccagggcctccgacctcaaaggagtccctgcctgctaaaggatcaagtccagcctgtccccaactggcccccatcctgaattccactggcaccctaaacgtcagccgacttcccctggctgacttgggcaccagtctggcaggcaccccctgcacctcctcccctcctttgcccactaggatctgtgccctcaccccctgccattgcccctcactagtcagtgaccatcttaaggcaaggactggctcttcatttgcacaggcctggcacagagtgggcacctggtttctgcatggcatattcatgaccttgacctcactgaatctgcagactcactgaacaggagaggcaaggcctggatttttgtccccatttttcagatgggatcattgaggcccccaagaggagaagggattcagccctgaattgaggccccttccttcatgagcagatggctagggacattcctatgaacctggtggggcagggaggcggggagaggttatcgtaataatcaaagaccagccccacttcctgagctccatctgagtctcacctcaaccacacgagtgaatggctgttttcatccccaacccccaccccccgccgccacttttcacagatgaggaaaccgaagccatgtggctcattaaaggggcactgggatgccgaggagagggctggggatgcctgggcccctgtgggacacagctgagacccagcagagggtcccagggtgaggtcagcccctcaagtctgcgccatcggaacgggctgggaacttgtggtccccggccattgattgtcactgctgcaggccccgaggcgggggacagccaaggacacagccagtctccatcagctccacctgggccgtgccctgcacggccaggtggtttgagtgcaggagtaggcatgctctcacacagcagggggtaacgggcagatggaagtggggcgggcgtgggagggggccttgcacagggccagaaggagagccggtccctgaggaaggaagcccctaaggcaaagagcatgccaggggacagccacaatgccaggtgatggagatgccccaatcggcccccgaggggcaaggaaggggccagaggaggctcgtgagggtgcctggggcttcagtgacagcagccccttacctgatggtctttgtgaccttggccaagtcccttctccattccagatccagggagggtgggggtgggcctgggggagctggagcttcagaggttgaatcattcactagcaggagaagccaagcctgtgagtcagtgagtgctctccatcccagaacgtctgctcccagcccagggatgcagccacggagtgccggggtcagccgtggaggaccctctgagaatgtcttgtggaaaggggcgccttgcctgcccggtagacaggatgagggcgccccagagccccaggggcttctgagagctgagtaccctctgggcctcttgcagccagcagagccaggcagagcttcttctggccttttcacctcctcccccacctcacagagcaagtcatcagcacatatgaactcccctctgattttaaactgatggcttgtgtatttcaccaatggccactgtctccatcagtggtcagtagcacatcaagtaatgtcaacaatgataatagttataatggcagtcactttatgtcagacactgagtgctgcacagacatttccttgcccacttaattgaaacaacaacaaatgattgcaagtgctgttatccccattttgcattgcggctgaggcccagagaggctaggtaacttgcccaaggtcacacagccagtaggtagcaaatccagggctggaatgtagtccatcaggctccggagtctggtctgtgcttgtagccattagttcctgtatctccagaagtgtgtgcggaagtcagcagagtagagtgtggttcgtgtgaactcactgtctcgggtactcccagccttgtgggctgaagccggggattcttgggaagaccttgcagctcagaagctgagccacctgcacctctgccccgtctacccactgagagaaatggacaacaggtggatttatatcagtctccagcaactcagggaccggtttagctctgcattcatggccccttcagggcacccggaagcactggcagtgcacgtaaatggcagctgatagatggggacctgtgccatggtactgaaggcaaacacttccctctaagcctcttgctgtgactttgcagcaagctccccagcaacgccccgggctgggtatgccaggcagagacctggagcatgcacagggctcctcccttccccaccctggctaagctggcagaagccaggccaagcagcgcctggctggaaagccctcccctgcctgggctccttctgttgggtgggcggtgctggcagtgggcctgggagcctgcggagaaggatcagagccacgcgtcactggggcagagggaagcaggctctcaaatgcaggggaattcgggcatcctggactgcccaaggttgggaaggagacaagtccaaggtcacatggctgagtaggtggcaggacttgaatcagagcaacaaggcaagggtggaaatgccaatggttggggaatcttgggactggcaggactcttttagagcacgaggaggtttccggagtcttggttccaaatcaaagttgtacaaagcgagtatgtccgtgtccttgaagagcaccttatttaaaggggtcctgagccagcctctcttgttctgtaggtgggtctctcagtaagcgagcaaccattttattccagtgagaagttctcccctgaggccacaggctcaaggcactttctccagctgcactgtccaagcagcgattttattagaatgcacttcctcaggtgcaccagccacatttcaagggctcaggagccacccaaggctggtggctaccgtcacagacagtgcagagagagaacatttccatcactcccgaatgctctgtcacacagagctgctctacaggaaatggaaacccaagtcctcacacggaccctgaagccacctcccacacccactccctggtggcacaaggccactaatgcagcagcttgggctcccccagagaaccatcctgaagagaagccccaaagagggctgactgctcacagaaatttgaagaggtgttctgtggtgggacaggctccagtctgagagcttaacaggtagggacagaaagtgccaggctgggcttgaacgggtcgttcctcagaatggatgagtgcattctattgtcagaatggcgccagctatgccagggggccacatcttattgatgtgatgggcatgagggacactgccctggttcactgtgtgccaggctctgtgtttgcttcaggggagacgacggaaagcaaaaagcaaacgcaatgcccttcctgccctcctggagcctttgtgctttgctcagtgttcaccaaagtaagagtgcaaacctggctggggccgggaggatggactgaggccacgaggccagccggtatctcccagggctcgggtccacaacctgagtccccgcccatcctgccctgaccccgcctcctcaggtagccacacatggctggtggctaccatatgggacagtgcagagactccgggatgtactgtcacacagagctgctttggagcaaatggagacccgagtcctcacacggacctagacaccccccaccaagcccactgccccatgcctccttggaaggcagtggccaagcatgtactctccaggggctgcgcagatacctagacaaacacagaccagggaggagggaaagggcctctgtcccagcagctcaccgtgctgtgggggatgcccagacctcgcctcgtgctgactccagtggtcctagcacacccagcatggggcaaaaaccagatccggccaccgcctggtccttattaggccccaccatatgcccagcgcactgcctgtgctcaggaaacagcagggaggagacgtgggtttttttttttttaattgatttcttcctatttaaaaacaatactcttaatatgctctctataggaaacgtataaaacacagagaagtcgaaaatgtagtaaagccatcctatcatgcaaatgtaaatccaacatctccatttgattcatttcacattgctgtcattataccatgggctcaattgtgtaatctgttttttacttcacataagcattttctttattaatataatcccttcctaaatgaatggtttttttcaaaatggttatagtttaattttttaagattataaaagcagtaagtgcttattgcaaaaagaaagaatgatcttgaaccatgcaaagaagaaatttgatcattcaacagttatttaccaagcacccgggatgtatcaggcggccttcagtaattacaatttttaatggctgaataatattctcccaagagattgtaattcgcttaattatttggctatttttggaaacccaggcagtcagatttattttgctcttatgcgtgagctctgctgaggagcctctgtcctgaggagagggcccaggcagaggtatcttctgccaaattgttctccaaaagggctttttcatcgcactgcatggtgtcgctcactgcaaccttgccagcattagatattttaatcaaacaaattgtcataagtatctaggtcaaaaatatgtactttactttatatgtctttaattgctgatgagggggcacgtttttcctcatgtttataagttgtcttttccttgtgaattatctgttcctcccttcatttttttttttttttttttttttccctgagacagtctcgctctgtcacccaggctggagtgcagtggcgcgatctcagctcactgcaacctccacctccagggttcgagccattctcctgcctcagcctcccgagtagctgggattacaggggcccgccaccacacccggctaatttttgtatttttaatagacccggggttttaccatgttggccaggctggtctcaaacacctcacctcaggtgatccacccacctcggcctcccaaagtgctggaatgaaaggcgtttattgaagtcttagtgtttcttctgtgggcttgaataaactgtatgcatgaaaaaacagtgacaatttaacagatttgttgcaaataatttttaagacctttgttctttgccatttttttttttcatgcaaaaggtaaacactttgttgctcacaattatttgtgatttcttccattgtttctaggcttagaaaatccctttcggaaatttgagagctgttcatttctgagttttccatgtgtcttcgtgtgtgtgtgtctgtgtgtgtgtgtgtgtgtgtattggggtggtgtagttgcatttttaagatacttaactctttaatttagggattagcaagctttttctgcaaaaggccagatggtaaatagatttccagtttgcaggccacatagtctctgtcccgactactcaactctgcatggtagcctgcaagtagccacagacaatgcgaaatgagggggtgaggctgtgtcccaataaaactttattcacaagaacactgggctgccagatttggcacttaagctgtaatttgccaaacctgttgaatccaaatgagatgtgtcttaggggatagtttgaggtgaggatctaaggtgcatcctttgcagattgctaaccagttgtccccatctctagtagcaaatcggttgttccctggctcatttgcacgcactgacactggtctgcagtcagacctggtgctggctgcctgtcctgacccacgggcccatctgtgtgctgctgtaccggtgatgtgcttttgcctcttgtacctggtatcatttaatacctgacctgccggccccacctcagcaatcctaaagcttgcttctctgtccagtggacttcagaaccactttgtcaagacccccttcctccctccccgccaagataaagcactgggtgatacattctctggacatcctcagagttccgaagccgcagatgagtccggtccccatggggtggggtggcggctggctctgtgcagatgctgtggatttgactctccgcagatgggaggcgggtgtgggcagtacagcgccatcctgagtgaaggcccccagctgaggatagccagacggccctgggaacgccacagcctcctgactgagaaacacgaaaacaaagccggcagtacaagagagcgcgggagattgggaagccactgtgggccggcagaagatgacctcaaatgacaggacttaggcctttctgctgctcttttggaaatcactgtcctgacactcagaattccctgcactccggcgtttcaaatcaaaccctgaaccgggttaaggcgcatggagtggccggttcgaaactgaacctacattcccacagattgcgggccaggggtgtgatggtggcacagggcgtgaccaaatgggaaggggccctttctccaggttggaccagcccggcagtaaccgcttggctccctcaaagagcagcaggagcaggagagtgtgtccagccccaattctcgggcagagcaagggctcaccaggcacaagggtccattccgccccccaccatgggcctcagctccatttctcctggaagcatccaggaccagacactgccacatcttggcttggagccacaggcccaggagagatgggctcaggagcagctggtcctggctcctctggctcctggggtctctgggtaccttcctgtagtcagagggcggctgccagcagatggtcccacgtctggtgcaggagaagagggagggctgtggacgggtagggcacgtctcccacctagtctcatctctccctcctggcctgtggttcatctgcccacaacactgtgaccagcagctaggcttggaaacctctgtcctggggagtggagcaagagtccccccttgtaacccatccatggggccagagggtaagaatgcgctgacctgggggccactgccccagacgcctgccctggtagcccctagggaggcactcgtggctgtgtctgtaggtgggatggggtgggtcagggctcccaggccaccgcctggccctctgcgccccatccacccttccccgaaggaggaagctgggctatagcacaatcgtgggagggggtatctgagatggagacgggcagggttggggtctcccctaagggaggaggggagggggtgagcacacagagcagaaatccaccccttcaggtcctgtccccagcccagctgtgctctcccggtgccttcccagtggggagagcaggcatctgtccatgagcacagagggggcgggaggaatggtgctgatgacagatgatgataagagggtcaggaactggaggagcagctggtggtgggagggtagggggagctgatgggctgtggggcgcactgagggagagactcggagccctgtgttggtgttgggtcccggcctgagagggggcctctgcctctgcactcccttcaggcactcctggagcacggcaggaacttggtggtgcttcctctgggctttgctggaaaagctttgggctcgtatgccgggttcctcgctcagaaatagtgtcttaggcaaaattcaaaaatgaaccagcaatgctcagttcacgcgattcagacagcagccaagcccttgatgaccttcgcgtcctgcagcctcggctgcagcttctgaggtaccctctctctgggcatcctcgccactggctcttcctccatcaccacatttggcagcaggcatcctgccccctcagctggggagagtggcacggatacttcggtgtgctcgttccttgggtctagatcacagaagggcaggcttgactcccatcttcagttggagcccccatttggaggtctgcctcccagatccttttattggcctctgaccttgacaccaatgcatccccccagcctgtactcccaaggactttggcctgcttccagaaaccaggatgccctctctactgcccctgccaggattcctaatggggccccatgggactcgttccctaggaggacacgtgtatgtgtcctggtagctccttatttagtcactgcctgtccaagctggaaggacttagcccagggcccacagccccatggcctccagctgcctgtaatttccttaattacctatttaggccccgacggcttccggtcctcagagctggctctgagattggaagcgggctgggacgggcaccgaggtaccacagcagagccgggccgacttggggcacctctcctcccatccacgtgctctctggctatgaagggctgggaggacagggacccggcttcccattggaccccaaacacgaggtctccgtccctttgtaggctagagtctttcacgctggccacagccacagcgtttctaggtccccatgccgtccctgccttcggggctgctgggcaggcccgggctggcaggaggggcgtggggagcacgtaggggcagggtagtggctggccaggctcacgctgctatgcagctcgcacacccgctgtaattggataattagtgtcattatgcttcctgctccctcgctctctccttctgcagctcttgccttctctggcaggaaacaaatgactgtcccccaaccctcagtgtagacttctggccccaatcacaaaggggcttccaacctccccgtgggatccagggacacccagcattgtgagggccgcctgtgtgggagacaggagcactgcgggagtccgggcaagcttggggaagcatccagagaggcacatgggttcagcccccggccgaacggaatgttctgacttcaccggtcgagcttggtcctgacctgtgaactctggggtccagctggagtccagctgaagacttcaggacaagcctcgggaggggagcgtgtggcgggaggggctgactcagcgaagagcattgccctgctcggcttcctggagatctcctgggcttgaaggaacctccgggaaaatgggcccagtcccctggggaccagcctcagggtgtgtgggcaggtggagccctgccttctcaccaacccagcaaaaaggaacgaggaccatttcgcagattaaaaagtgaaggcccagagagcttgagtgaccaaagccagcacctgcactctggaaccctgaggttgatggggacagatttcctgtccagtcactttgctgaactcttttcattggttctaatcacttgctcgttgcttttctgggcttttcagggcagtataacttggcagagcagcaatgtcgaatcctctggagctagaccacttgaggtcctgttggcctctgcttctggcttgccgtgtgaccttgagtaggctctctaaccactctgtgcctgagccgcatgtgctctttggtggggagggccaccccatgctatagaggctgctggcagagtgatagtcattctgcctctcatccgtggctctatcatctcccttctgcctcagctagaacttctaggacaatatcaccccccagggagctcaggggaaagtgggggtttggtaggtcctggagacctcagggaggcctcctggctctcccagaaccaggctggatttgggttaggagtgaacatttactcaggctatgggcttggcctatctaacagagacccagcataacagtggcttcagtgagagagaattgacttctttctcatgtaagagtctaggtgggcaacctagggccagcgcaacagctacttagccctcaggaatctgagctcctttgattgtgtcatacatggactccatgtgcaagatggcaacagatagatagctgcggccgcacctgtccccacatcagcattccagctggcaggaaggaggggaagggcagaggagaacacattccttctctttaaggacatggcccttgaattcgtccctgtcacttttgctcatacccagttggccaggacagagtcagatggtcatggttagctgcaagggagttgggggaatgtaatcattagctggatgacaagacacttagctgaaaattaaaacatgacgtaggaggtgggagagtagctagcaagtttctgccacacacctctgcggattcattaacacctcctcaagacacatttgagaagtggaaggtacccatcttgaggccaggctttccccaggtgacctggccagcccttctggggatggaatggggtcagtacctctgaagaagtgcagcaaaaagaggggccatttgtgagcaagagggcaggagcagtggtgatggcctctctccactgatctgctcctgtgccaccaaatagggtacccacctggctgggcaggatatgggtggtgttaaaagtcacagaggctgcagggtgggggtagggtgtgtggggaagggtctgcttgggtttccatatccagtaggggggtttcctggaagttaaaatccatacaagcgaactgctggctgattgggctggtcaaggcagtgaaactcctgcaatcacggcgtgtggcttgggcaccacgggaggccattcaggcccagtgtccaccaccctggacacagggcgaagtggctggtgggggctgcttgcgtgttctattgtggtggcatagacatcacctaaaatgtaccacgttcaccatttttaagtgtgcggcccaggggcagaagcacattcatggtgctgtgcagccatcaccaccatccagccgcagaacttgttcgtcttcccaaactgaagctctggccccgttcaaccccaactccccagcccccagcccatggcacccacccttccactgtccgtcccctcagatttcacagctctcctatgaggccctcacaggagtggaatcctacagtgttggcctctctgtgactggctccttctactgagtccaacgtcctcaagggtcagccatgttgaagcccgtctcagaatggccttactttgtaaggctgagtcctattctatggcctggatgggccacatggtgtttatccagctgcctatccatggacattgggttgcatccaccttttggctattgtgagtaatgttgctatgaacttgagtggacaaatacgtttgtgtccctgctttcaattctttggggcctaccccagcagtggggtgggtgggtcctatgggaattctactgctttccacagtggctgcaccgtcttccattctatggcggtgcttgtttgaatgagaattctgggccagccctggagcctctgaaggcaggcaaatgtgtggtctcgagcttgactagacacccagatcccccaggggttggggtgctttatagcgttctggtcctcccgcttctgaatgggaagctctggacccaagactctgtattcgtgaagttccctgagtggggaggggtgcccacccaggtctggcatgggctgccgtagattagagtagagcgctgggccacctaggggccaggagtgctgcagaagtgcatccacccaaaggcgcaggctgaatcgggcaacctcctgggctcctgccacctccagggtgtttctgtgggttccagaatcctccttgtctggacccttgttaacgaggacttccaatgcctgtgtctttctgcggcacccggcgccggacaggcggttgctttggctttgcacgcagctgccagtgggtccccaaggtggcccctccggggctgccctgcagggcagagcttcaggcaggtgggtgcatgcaggagtggggagggggcgccatggtgatggctattgtttttgcccaaagctgttccaggcatgagagccacttgtcatgtgtacagattgtaccaggaacagggggaggaaggaacagagcactgggggccggtggggggcagagggggagcctgtccctttaaatctgttttctcgggttttatttccttctcttttcccatcctcctccctccaccagcacaagtggagccgtgagggcccaggagctgcagcgacggtgcctctgaaatattaatgaggctgttctctgcctcagctccttccctcccccttccctggctgcatgcaggccttgtccttggaaccctcctttcccctcccaggtggtcgccaaggtgcgtcaagcagaggggagggggcaggggcgggcaggaaggagagggcctggcgcaagggcaggaagatgtggggaatcagggataaaaggggtctcccaggtgcacaccagccaccagcatctcgacctgcctaggatcatgccaggcccaggagagggcagggtggctgccagactgggcgccctccttccgtgccctctccccacctgctccccagctggtctaggggcccaccccgggcctgacctacgaggcctgggccacacctctcgctgttgccttggcttgcttttcctctctgggttctgccgggcctggcctgtgttctaggagcctggaggtggagagagatgggggactattgttttaaggaatccccgtagtgagtcacgtcgctgagtgatgggcccttctgaaaggcgggcccttgcttggtgggtctgtagggagcaggtgacggacagtctgccttcaggagggcccacggtggagggcatgtgcccaggtaggcccccaggcgtccacctcctgccctctgcccctgagttctgcttccttcttgcttcggggccacggcatcctgggcctggctctggcttccagatggtctgaatgcccaggagccgcatgttctcatcactgagggtccagtgactagggagtgactcgggagctgggacttcctggcagtacatgccccatcatccctgtggggatatatgtccacgcagaccccagaaactgaaggggtgctcgactggggtgcagtggggctgttttcaggaaagagaatggcgtgaatcccgatgcgtgcatcacctgagatctggaggacggtggtgggatctcgccctccatctgttctctcctccataaaggcggagcaggtggccgagtggaatgcagcctgggcctgctggggaggctttcaggggtgtcatcagagcgtcccagcaagggcggccatgacccacctcaagtcacatggaaggcagggctgggagaaccagggcaaaagcaggaggcttcctgagcctcagtttccccctctgtaaggcagggagagttctcctggccctcgtagggtgtttccaagggtgcagtgaaagaaacatgtctgtcaagagctggcatgcagatgtgggctcaaaactcagtgtgtgccatggggtcctgagaggggccccatgggagcgggggtgccccctacttagaaagtgccgagccttctggagcatgctgggctgcccagggcctggaggaagtccatgggggactaagctggaggtgccagcagagcccccaaagccagggagggacaacataggggaaagaggacccctgggtctctggtcaggtgggtttgagtcactgggtggggagtaggcactctgagcctagttgggaggtgagggtctctgggccctgctgaagagaagagtccagaaggcggttgagtaatgggcctggacttgggccatcccctccagcagcccctggaggcagcagccagggacccccctggctgtctcccaccacgaggccggccagtctgtgcggggatggtgcaaatgccggaaggtgcgaggccccctctgtggaggttctcatttcaatgaagccaattaaggtcagaaagatgaaagagcacagaaatggtatgttccctgcccttttggtgcctacagaccattctcggcagccagcccaggccggaaactctgtcaggcctgcagaactgataggcctagtcacttcggttcttggccatctcggcgatggctgctgtctttattgggcctcagggaggccaccgcccaggcttatatagaacccagaaaagcaaagtatatgccatttggtctgcacagcagccaacagtcgctctaaatgggccttactctaactgatggatcctgtctgccctatagcctgttgcattcatgaagacagtgagggttagcagagcaccccgaccccaccctgtcctccaggatggagactccacctcccaggactccaagttcctcccctgtgggccaggcccccattcactcattcctccaggcccccggccacatgcgggactgaccacgcggtagacttcctgccgactccataccacgtgtctcaaagagcttagggcccagctggtgggagacaagctcacagatcatcgcagcgccaagcagagtgaaataggaatgggtcgcgggattatagactcaggcgcaatcagttttggctggggaactggcagagactcctggagaatgttccacttgaattgtgactaagaggattcatcggaggtcagcaggtggagctggaacagagggcgtgcggtcggggctcagagctggcagggctgtgtggctggggtgggagtggggctgggaagtgctcagaaggaatctggccttttgcttgatggggatgggagactgaaacaggggctcgctggagtgatggtgcctgaaccaggaaagtggtgactcacagcagggtcatgaccagttgctggactagagagagacctaagaggtggtccacaggacgtggagcttgcttgctgaggggtggggatcctgcagtggggagggccagcagggccagccgaggagaaggaagttggccccgggaccatggcagaggggaggactgcctccttgcccactgccctccccatgagtcactgtgggtccagtcagacacagccatggctgcaccagtcaggagcagctgtacgacctggtatggttctgtctgggccaccgctgtggggtcaggggcagggaccgggtgggggaggacagagctggccttgggtatgccatggtcagaggagggaggatgagcacatgccaggggagggccaccaggcctcggtgaccgtgccacgaggaacccctgctctgaggaacaagcatttctgtcatggccgtgtgccacccaagagcctaccacacaagccattcactctgtcacccgctgggggcacagagcctgaacctgacagtggcacaaagttgctacatggtgggattgttgaggcatgaggtgactggagctcaggaaggcagggagaaggcgccctggcaggtgcaccgtcacaagcaaaggtcctggggtggggaggggaggctgtctcgagaagacgaggagtccaggtgagagccgaaagctgccattgctgccttgaggggtcagaagtgggacacccagctgtcctctggctctgccacttccccaagccagcctcagtttcccgcatcagaaaagcaagggcaattcgtccacacagcacccccagaaggagcccgcctcacctgggacagcttcgcttgctgtcctggccccctctcctcagctttcactccttctagtcttttccccccaatgcctgtccccagacgccttgcctcacctttgccccagctgcaaccccacagctcttggccctcgggcctgctgttctccctgtcccagctagagagggacggggttagttgaaacttgttgagcacctgtcccagcacatcaagccagtgccaggcatgtagtagctgctcggtgaatatgtgtcaggtgaccaactgcaagacagggcggggagaggtggggagagaggacggcacaggcacatggccatcattttgtccccacatctcccagaagtgaaggctgcttcatgtgcaatgtgtcgcgagagtaaacgcgcaggtgcccacgcttttcaaacatgggtcactgtggatggatgtttcgtgaagtatccaccagggcctctcctgagaataaggccatggacttggccgtgtctgctttggctgcctgagggctttctcccctttcttcagggctctgggccactcgtttccaacggatgcttctgagccaggagcttccccagagacgggggttcagggccctgctgagctgccaggagggctcttggctgatgtcaaggccaggccatgtgcactgaggccatttcagttccatgaggatgtgacaggcttagctcgggccgggaaggagcggagagagaggagctgcagtgggccccgccaaacactgtgatggctgcagaaggggcagcctgggccctagcggatccttgggtaaggtgacggggacagggagagggatgacaactttgcgatgctcggcagagtggggccagggccgtggcctggatgctttcagtgtggggagactttggctccttactttgtcatctggagggaagaagagcgtggaggggagtgggtggcaccatgctgtgggctgggacgttggcagactcaccagcgacctgtggctgctttggctttctcctgtgtaccctctcctcctctcctcctcagccactccctttatcccctccctcttctccctccctccatccccctttccctccctctctttgcctttccgtcttgtccctctctcccctcccctgtttcccacccttcctccgggcctcctcctttcctcgcccctggccccccaggtactctcagggccacagaaaccgtgagccactaaggccacaccagaagaccaccagggactcatggcatgcccgctgcacagggcgcatcttaaccaggcaagagcagggagtgaaccggagtgaacaagcgcaggactggtggtggggcgcgggcaagaccagccactgatcagtcccagcacgctgccctcacttcagcgtgggttcccgaatggatctggggggcagtgacagcctctgcctccagctagctagtgttaaccactgcagggtcctggcaggaggcatcgacacttcccctcccccacctgggcaagccctccaggttctgggcacccatggtgggcaggacccgggagtggcctggctggtggggcctggcagagcatgagggccactggcccagcctgggaggtgatttctgcacttcgagggtcatggcacagactgagtgaagatttgccgagaatattctggaagatgggacctcagttttgtctcaaccactcccctggcttcttctcgcctccatctccccaggtgtccacgcttagcagctttctcaccgccgccaaaccttgcctgggcactgggaccgtgggtggccgcctgtccctagctgtggctgagccaagattgcacttgtgagaaggcctgacaggcagcatgggcgacatggccaatagttccatcgagttccaccccaagccccagcagcagcgggatgtcccccaggctggaggctttgggtgcacgctggcggagctgcgcaccctcatggagctgcgaggggccgaggcgctgcagaagatcgaggaggcctacggggatgtcagcgggctctgccggaggctgaagacctcacccacagagggtaagtccctctcaggctgcatgccacccagccctgctcccagccttcagaggagcgacctgaaggcatccttagccccaaggctggccagggtcaagggccacctgtgcccctcctctcagccatttcccttgagggggagatgccctgggtaacctgacctgaccccctcatctccacacctccacaatcaggagttctccgctctatagagcgagactggggagggggagatgggaacttcatgggacacacacacaggcggaatgggccccaaacagaaacccttccgaggaacagggcagggcagggcagggaggaggaagacagccccatctgtatatttggggatttccggtgtgctcaaccctgtgttcacttaagggggatcagaacaggaggaagggatgcagggtgcaagccttcggagtttcgggtgaccggggcctctcctgggaagagagaggatggcctggggatggcacaagccatttgggtctggcaggaaggggtgaccgaagctgggtcacgggaggcccagagtgctgatcagaggtggcactgactggccacaggctgtcccaaagaggcacaagcccagggtagtgtcggtctcactgctgagggaggctctagaaagcccggtgagcactgtctagaaagatctggggcggaggcctgactatccctgtgggaggcaatgttccacccggccttgtgaggcctgcccagccctggttgctgcggtctgccatgaagcggggacccccaggagccaggcccagccccagattccaggagccacagcattctctggcgctgcgtgcctggcagggctgctggggctatcccagcctagtgccaggcctgttccccagccagtgcgggctgatttgatctgctgcccatctgggcaacgcctgggcccacccatctcctctgctcccagccgtgaggctccttggcacctccagcctcccgctctgccctcaccctcaacccagagactgttctcttgtggctccggcctcggccccgtctgtctgcaggtggcactcaggctgcagggaggagtgaagatggaggaggggggctgcgggccaggtcaggaactccagggtctgcctgggtctccctagctttgtgccctggagctgatgcgcccgtgacacccggcctcgccgccgcacacgccctcacggtgcagctgctgctggggctgatgccttggctctgctcccgagcatctcttgccttccctcctccttgcccagcccccgaggaggctgtggagggccatttatccacaagagctctggcctctcccagatcaaaggaagcagatgggcctcagctgtctgctcttcccctgtctgccaggccttgttaaatatttaaaatgtcaaggcccctgggaacctgcccgattctgccatggagctcaggagctcttgcgtgcctgtggaggcaggggcacggagaagggcaggtgcacaggtgggtggcttggcctctgacgggcttccaagcacctgggtccccaaggccacagtgcagggagccggccaggcctggatctgctgcccacagaatgagcagcagaggaccggcccctcccctcttcaaccctcaaggtcctcgggctggagctgtcgggcttgagctgtctgggtgccaggagcgggtgactcgctccccgcatcccctagcccggccgtgcacccggaccctggtgctcagacctgcctgcccctcagtcctcctcagacacaagggcctgagccacgggggcagctggctttgttgtgccccaagccccatgccaatcccctgacaaggtgggcagacgtggggctgcccaggaggcaggcactcccccgtggggcaggtgctttatggcgcatagtgcattgcgggaaggggactttatcttctggcggtacactcatcaatccactgccctccctgtcttgggagcactccaagaggattccagaacccatcctggaaaccgcgctgctgttgtcaggaaacctgggtctcaggctgaactcagaggtgggttcgcccgggaacctggccccgcccagtgcccctctgggctccacaggcagttctggaaaggagggggcggattcgctgggagccgacacgagatgctcctaatccaattctgatggcatctggcctctgctccgggcaggccgcccatctgtgtccatgccaaccggccagcccctgcccccatgccctggacctggactgccctcgggcctgctggggaagcatgtgctcagagccagaggggccgcagctgtgttcctcctccccgtcaatgggtgctgcagtggggcagccgtcgggaccccgagcccacaggaaggctaaggagaaacgagcaaggctacagctgcaagggcaggtcaaggccaagggagaggctggcgagggcgagggagctcctggggaatgggccaggggtcccggctgctctcagggacaaactgggcatgtgaggaggggcaggcaggagagagactcgcatggaggctccaggctaagggcagtggagaccccaggtgtctggggagccctcccctgctcctctccctccgcagaagccccacggttagcacgtgcttcttcttaagtcacttggggggtcttgtactccctagtactgtccccacctggcttagctcctgtaattccaggagacagtcccagtccagagcgaggtgcacacccctcagttgggtccctggtccccagccccctccccaccacccaggagctgaggtcgtgcgttaaccccaggctcccgattggggcaggctcgggcctcagcaagaggcctttggctcctgaagaaacctgagccaggggcagagaggcacggacagctgcggctcttctgggtggggaggacgccatgtggccgtcgcctagctggggtgaatgagccacggttgtgcgggcggcagcttctgttccactgcggccagggctacccctgcccctcctcagaagccccaaggttagcatgcgcctgttctccagtcatctggagggtcttgtgtgccttcccagacccactgtgagtgccccatgggctggggctgggctctctggtcatcccgtccctgcagcagatggcaggcgtgagcccagctgcccagggctgggagctgcaagctgctgtctgtccaccaggtgtcagtgtgggtctggtcacggccgcgacagcactgggcgccgggtgagcgcccgggagggctcctcgggatcagccggggctgagaatcctggggccaagggtggggccagaggagggtgtcatcccacatgcctgccccggtagaaggtggctgagtgggtgtccaggcccggatgccagtcacgcacgtaagcttccagtaccttcaggccaaggaagactgagaagtaagcgtcctcaaggatgacaagtgacagaattggatagggacaggtggctctgattgtgaaggcaaagccaatttgggggcttctgagtggctttgggtgtcattcaagtcgccatgtagacaagctgtgagccctggctgagggatcaaagttggtgctggagttgcattagaaccaaggctgctgggtcctgagggccctgtgctcaccgggtcctgtcgggcagcgtaggttctgtcctgacctgggccacaggccagagctctgactcatggttacagggccctctccacctccggcctcagtggccttgtctgcaccctgcagagagcagctgatgagcagcccagggtgggcagtgtctccccgacccctgcgaggccatgcagcccagaaaaggcttgaagacttcccagtcccctccctcagcaccgtgactccggtttggcttctccccgcctgttccccaccaggaacccactcccattcccgtgcctctctctctcctcgcgtgacaccgttcttcttctttgggtctctggacccaagaacttgcatctcccattagctctcatgctccctccccactgcttcttccccgagaaacttctggaaagtaagcctccgctccctgttgccagcagccacaggcaccctggagactgctgattcctcggcactggccgtgctcatgccccaatccctcgggccctgcccaccctctttgcaggctgtccctgcccccacaggttgggctgtgtgacactgccagtctttgggaccggctggccccatcttacagagctggggaggggggtgttggtgacaagcctgctcagggaattcataggctgggagctagagaggtgtttcctgacaggcacagagccctggcctagtctttggcatctggtgccatcccagcctcccctgattggtggccctccccatgtctccactaaagtcccctggacactcgctctcctccccaggggaccattggctatactcttctgtcctgtctcctagcaacccttgttgacctggacataccctgctgggtcccctctgtgcccccttgttgggtcctgtcccctgccttccagtgccccctcagcggtagtgtggaggtggccaggaaagcacagggacctgggacccgctggagtccaggagcctcctggcctgttttgtcatctgtgtgtcaggaggaggatggctagggactccccatgacagcagccagagagccgcatgctcactcccacgtgcacacccccagcagtctgcagaaaggctcctgtctagagggagagccaggcgctggccagacggccccagagggctgctgccaccccaggagcagtcagtcagggccacataggaggcctgggacacacaaggccgacccgtcccatcccatcctccccttctgtgcttccggggcaccatgcaggcctggcggacaacaccaatgacctggagaagcgcaggcagatctacgggcagaacttcatccccccaaagcaacccaagaccttcctgcagctggtgtgggaggccctgcaggacgtgaccctcatcatcctggaggtggctgccatcgtctctctgggcctctcgttctatgcgccgccaggagaggagagtgaaggtaaggcccgggggcctgggctggaaggaggaagaggaatggggcttgagatgagggacggtcacaggatggtgatgtctcctccactgcttcccttctgtcctccgcacagcctgtgggaatgtgtcgggaggcgcagaagatgagggcgaggccgaagctggctggatcgagggggctgccatcctgctgtccgtcatctgtgtggtgctggtcacggccttcaatgactggagcaaggagaagcagttccgaggcctgcagagccgaattgagcaggagcagaagttcacggtcatccggaacgggcagctcctccaggtccccgtggctgcgctggtggtgggggacattgcccaggtcaagtacggtgagtgccctggtcttcacccaccctgtcaaggaagctcggctcctgcttctggggagggtgagccagaggagacccccagcacaggttctccccggtggcctgcgtgtcgtcacctgccttaggaggcgggaggtggcgggggtgggggaggtgggggaacacggggcagggcagagtggtttcagacacagcaggcccccgaagaatcaactgtccccacagcctccacggcgggctttcccccctacaaaggatgcaaatgtcctcgttccccagaaggaggagggctcctgagtccctttcccaggcggcccatggcacctgacgggacctcccctggggcagccgggaggaggcggtggggagaaaggcctctgcttcccggtgctctaggcgacctgctgccagccgacggcgtgctcatccaggccaatgacctcaagatcgacgagagctccctgacgggcgagtctgaccacgtgcgcaagtcagctgacaaagatcccatgctgctctcaggtgagggccaccctccgggccagcctggcaccaaggggcgtcagcagccgtgtggcccagcatcctgtccaggctgcctgctgggctcagcctccacctccaccagggccttccagcataaccttcaggttgggaatctgaagactccgcccgtcttgaggcctgatggtggcagctccagccacagggcgaggaagctggccctccaggcccgggagagtgctttgtgtcctgaatgggaagccccaagcggagaggcttgcaggggccagcacagcgctgtgcttctctcaatccagaccctcgacaatatccagtgggggtagtgttccctttccagaaggtttcagcatagtccggtgtttatcccagttggaaacgtagtgtgaaacgggacaggaaggctggaggccctaggtgggccctgtgggcctcggggtctcctccaagccagggaggaggcttcagcctagttttaaggtggacaccgcgtccctgcttccgggagaccctgggagacaggttgtgggcgctgaatgtgtctcccactgggtgatacaaattcctgtctcagtctctgtgttgctgttccaggcactcatgtcatggaaggttctggaagaatggtggtgaccgccgttggcgtgaattcccagacaggcatcatcttcacgctgcttggagctggcggagaggaggaagagaagaaagataagaaaggtagcgcagcagtgccgccagtccctggtgctggtggcggctccttccacgctgcccattctttctttgcgggccggtgccactgggggctcagggagagccagcccaagtgggtgggaggccgggccctctcttttgattctccgtggagactcctcttctgaggatatcccccctgagagccggcaggccaagggcccctccagtgccgtggacggggagtttccctgagaccaccatccccaaaggctccgggatcccatacctacctggacaggaatggcgttagagggacaggagctacggggagcctcatgcttaccctcagggcccgtgcccagtaaggtgccgaggatcccaggccagcgtgggaggcagccagggaggtgggggtcagaggtcagaggaggctgggacaggtgagggccgggcagcccaactgtgggtggtggccctgccctggggcttacaaagctaggcaagcccgagccaggagggcccattcctcgtcctgtggctggagctgccaccatcaggccctgcagcgggcggagtcctcagaccttctaacctgagtactattcagggaggccctgatggacaagattgaatggctgccacagccccttctggctgggcagccttgctctggcctggacttgccttctggcctctcctgcagccaaaacatggtagggagccacacccgcatgggaaagctctgcttcctgccagtgacctccagccagggccctggggccagtgcgcggggtgtgggggcgtgggggcgtggggcgggcagtcagggcccggggaaaaggtcagccctgagcccaaagctccctggaggcagcaaaggagtagctggatgaccctctgtggcctagaagcttcgacgagccctgcctcctggcagcctgggcctgtgtctccctgcaccggctcttctttgtggcaccaagtcctgtagggctcagtgcagtgtctcaccccagtgagtgccctgggggtgcgcaggcagatgggcagccctgggcctcgtctgggctgggctggagtccctaggcctctgtcctgggaagcccagctgcccctgcctgggctgcctcctcatgtcttgcacacaatggccctctcccatcgtccacgggaacccacgctcctctggagtctccagccgcccttctcaggctgctcaccttctctgtaccttaaatgagtgtgtccttcctaactgttccaggcctctcctttcttttttaaattgacaagaccattcagcccctcccaggccccacctggccctcctctccagcaccctcaggctgtcctacttaggagtcagagctagagggcttcctggaggaagagaaccctgagggggccctggagggagagcagcagctggccagctgggtagagggtaccagcaagaccagggggctccctgctcgccctccccgtctctcccgccccatccccattgtttggcgcagcctgccaggtacacgcttaggatacttgccttctacctgcacccaaccccctatttcttgtctcttgaccttgactcctatgcacctttctccaagtgtgcttctcctcctcaccttccccccactcctgtctcttctggcggggcccagccctcctcttccagcaatgctcatcccagacttccccctgcctccctcctccagaggcctcccagggcctgtgtgcaggctgggtccagagtccatgcttccttcgggcccccacggccccaaggctctgccatctcccctgctgtgctgtgcggtcatcgcactgccatcttgtgtccgtgggggtctcccctccctgcaagaagggccctctgtgcccacaggaaccctgggcggagagggcctgatcaatgccccacccctggctgagtagggtcggggggggggccctccctgctccctggggaccccggatcccaaccccaactgcctgggagtgcagatgtggcccccaggaagctcctctaactgcagctctcagaaggggtgactgtgcccaccacctgagcccctggatagggccacttggggcccagcctggccttgcagggctgctgtgtgccggggctcaggctggcactcctgtgctgcagccctgggttgaccaatgacctgaaagcgccccgcagagtcctagcgtctcattcctttgtccctttaaaacacacactggggccaggcacagtggctcatgcctgtaatcccaacactttgagaggtcaaggcaggtgaatcacttgaggtcaggagttggagaccagcctggccaacatggcgaaaccccgtctctattaaaagtacaaaaattaactgggcgtggtggtgtacacctgtagtcccagctacttgggaggctgaggcaggaggatcgcttaaacctgggaggtggaggttgcagtgctcaaacacacacacactgagctaactgctggacgtgactgcagggaaaaccaatccctaggcaagggcagctgggtgctgtctgcctggcttccaggggttaggagccatctaagtgaaccccttgagctggtttgcagggagcagacgtcccgacttggggaggttccagcttccgggaacctcccactgccagccatgtgtgacccagggcccttccaaggctggctttaggggttcactgtagggctgagcttaaggccgaaggggagccctgggcagaggtctggctcaggaatgccagtgttcatggtgaccgtgtgctgggaggtggtgacggggtgagcctggagaggacggggcatgaagaaggccaccagcaatcaggcccctcctccccaccccctctgccacgcggcccccaggctggtgtcctcaagccttcgtgtctgtcatccctcttccattgtaggcaagcagcaggatggggccatggagagtagccagaccaaaggtaacgggcgccgctgcttgggcacaacaagcttggagccctgggggtggggctggtggagggcacagtgttgggggaggttcacctgcctcggtggcaggagcaacacttggagaccaggtgagtgggctggctgcacagtcccgtcccagtgcagagggaggagagagcacacccctggggctgctcagggcatcctggccacagacactgctggcagctcagcccagccacctagaggagaccttagcccagcatgggcataaggatcacctgtgagtgggcgccccgagtccactctggccagatgagaaaactgaggcccagaagggctgactcacctgaagctctgggtcccagtcagtgtgtttcccaggccagcttcctttcagccaagcctgaggacctgggagacagagtggtcggctgagggccagaggcccggctctcctctcagccccggacagctggcaggtgccgacaccctggggccagcatgagcctggctgtgagacgcaggaagcaggagaaggggtgggaggagcggggaggaggccagccgtggcccacggaggacaggagatgtcggccaatgcagcagccagctctaggtgctggagtccatggggaacaaggcaggtcctgaccctcaggaaggtcacaggcagagatgacccaggcaacgccctgtgcggagctgggtttgggagggcagtggggggacagcccgatggctgcagccctgggttgaggaggtggcagcaggtggggcacaaagctggaggggcccagctgggtggggcaattgtgtcctgacgccactgggaagaggagccgtggcgaatggccttgggctggcaagtgaggaggagcaggaggaggcagaggtgatggcggtagtgccaagagccccagtggatcggggaccagagtagtgagggagaaagacgagtctgctctccccaggtcgctgcgtcggtcccggggcagaagagggaggtggggtggccaggattactctgggccgtggagtgggtgcggccagagcttggcagggagggagatgaggaagtgacagaagcagaggagtggggagaggagggagccggagtgggggacacaccaccaccatgtcgagggcagcaaggatgaggagcacaggacccaccagggaagaagggagaggagccgtctgctccaggggagaggcagggagggtgctggagggacagatggagcccgaacaggcgcagggctggctggtgggaggagagtgcatggggcttctgggcctccctaagggaggtaggaggtggctcggacaccagtaagcagatgagtcagctcagggttctggaagattcctcgggccacaggcctctgctctcaggtattatttggggcattccaggaccagtcaccctgtctgtgtgcccaaaagccttgtgctgtgtctgtcctcccttctcccgagagaaccatctctgtcccacctagaacagtgctggagccaccccacccaccccaagagggcctgggcttaggaggcgagagaagggaagctgatagacttggaaataggagagctccactgaatcccgtctcctctctatggtgtggcatgtctttcccccacaaaagccccttataacgccttctccccagccaggcactgaccttggccatggggttcctctgtgtgcagctaagaagcaggatggtgcagtggccatggagatgcagcccctgaagagcgcggagggtggggagatggaggagcgggagaagaagaaagccaacgcacccaaaaaggagaagtctgtccttcaggggaagctcacaaagctagccgtgcagatcgggaaagcaggtagggacagcaggaggtggtgggcccaggccattgactgggcgtggaggatgctgggctcctggagatgagcccaggctgtgtagagcaggtgggaagggatgtggcaggtgatgtgtgggccaggcaggcaagggcacaggccaggccggcagtggccatcagggcctggcgcagcccttccctagtgagcagaagtcccaaaccctcgacgaaagcccgggtcacacactgagccactgcccatgaggtgcccctacccaaggctccaggctctgcccctggcaccctcaaaaggcagctgggggcatgcagggctggtaccccaacttctggggtgcagtgggggattgactcttgctagtcctccccagcggtgcttctcctgccatcagaccacaaagtccactccccaaccccagcagcactccagaagaggccacacagagcccccttgcaaacaggccccagctcacctgctgagccaaacctgggctgtttatcctgaaacgcaaggcaaatctacaaggccttcacaaatgcctccgagaccgtgtccatacctcttcttccctcttcctgtccccctccttccctcacccgtggcaacccctttcgtctcctccccgctctgtggcagggctggtgatgtctgccatcaccgtcatcatcctggtcctctactttgtgattgagacgtttgtcgtggaaggccggacatggctggcagagtgcacgccggtctatgtacaatacttcgtgaagttcttcatcattggtgtcactgtgctggtcgtggctgtcccagagggcctgcctcttgctgtcaccatctccttagcttactctgtcaaggtaatcataaaacttacagttgatactgtttacagactcggaaactggggtaagaagtcattgggcgccttggtggcagtataaactggggacgtttgggatagctcaagggaggagaggaggtgccgagcagggacccagggggcagctttgctgatctgtcagctcaggtccctcggcatgagatgggccagaaagcaggcaggcggtgagatacccaggggttcagcatctgcacaatgtgggcagtaggacggaggggctgggaggcagcggggaagcggagaatcagcagagggcccgggacactgggaggcagtgggaggaggtggggggagccaggtgtggggtggtggggtggtggggtggtggggtgggagagctgcagggctggtgggtaactgagagggggctcgggcaggggaggtcccgggtgcgcatcccgcccccaccattggatgaggttgctgatgccttacagcctcgctattggctcagggctgaccaggtgcccagtgggcttagtgccacacgtggagctagctgagcagaacagagtcacgcgatgtttgtgttgacatctctcactcctccaccccaacaagcacctgggccaaatgcccacaccctcgccctttgcagaaaatgatgaaagacaacaacctggtgcgccacctggatgcctgcgagaccatgggcaacgccacagccatctgctccgacaagacgggcacgctcaccaccaaccgtatgaccgtggtccagtcctacctaggagacacccactacaaagagattccggcccccagcgccctgacccctaagatcctcgacctcctggtccatgccatctccatcaacagtgcctataccaccaaaatactagtgagctggggcaggagcgggcgggcagggccgggggcaggagcaggggagggtcctggccagggtgccaggtgagctgttgcaaggtgctcattaggcccccccttgagaacttttgcccatccctggcctcacaggtggctctggctgggaaactgcctgtagctaaggccgaccttcctctgctccctgccgcccacaccctaacaatgtggtgaccacgagggggcagagctggggctccaggggcagcatggagggtggtctcaggcccccagtgcctgctagccctcgtcatcttgcagcctcctgagaaggaaggcgccctcccacgccaggtgggcaataagacggagtgcgccctgctgggcttcgtcttggacctgaagcgggacttccagcccgtgcgcgagcagatcccggaagacaagctttacaaagtgtacaccttcaactcggtccgcaagtccatgagcacagtcatccgcatgcccgacggtggcttccgcctcttcagcaagggggcctcagagatcctcttgaaaaagtgagtgagcagcagggaggtgccggggtacgcacggagtttctgattctattgtcgtggtaaaagaggccgaacgtaaaattcaccatttcaaccactttacagtgtacagttgaatggcattaagcacgttcacaatatcatgcaaccgtcaccactacccagttccaaaacacctccatcaacccggaaagaaaccccaggcccatgagcagccctccccacgcccctccccagcctcatgtgcttcctgtctgtatggatttgcctgtctggacatttcctatcaagggactcatacactgtgtggccttttgtgtctggcttctttccttagtgtaaagtttttccgtttccctcagatattagaccttcctttctttttttgttttgttttgttttttccctcaagccatcctcctacgtcagtgtcccccgtagctgggattacatgtgcatgccaccacgcccagcgaattttcaaattttttgtagagctggggtctcctcatgttgcccagggtggtcttgaagtcttgggctcaagcgatccacccacccggcctccctaagtgctaggattacaggaatgagccactgccaccagcccgaacttccattctttctaaggctgagtaatatccattgtatgctaaagagcattgtgttggtccatccatcccttcatctgtctaccagcacgtctaccagcacgtgagtcgtttccaccttttggctgtcacgagtcacgctgctgtgaatattcacgtacaagtttttgtttgaacccatgttttcaattcttttgcgtggacatctaggagaggaatggctgggtcgtggtgtccacgaaactgttttccacaggggcagcaccgtttcacattcccaccagcgacataggagggttccaccttctccccatcttcaacagcacttattttctggtgtgacaatgctgatgggggccatccttgtgggtgtgaggcaatatctcctggtggttttgatctgtgtttccttgatgactaacaacgctgagcctcttttgctgtgctgactggccatttgcctgtcttccttggggaaatgtctgtcctagccctttgctcattgctgagttgggttgtttgtctttttattgttgggctgtaacattttttctgtattctggatcctagatccttatcagctatgcgatttctacacattctgtcccattctgtggcctgtcttcactctcttgatagtgtccttaggtgcacaaatgttttaaatcgtgatgacgtccagttgatctattttcttgttgttgcttagagatgatgaaaattttcttagagatgatgaaaattttctggaattggagactggtgatggtcgtgcagctctgtgactatactaaaaaccatcgaattatctactttaaatgggtggactgtgtggtgcgtgaattatatcccaataaagctattagaacaaagtaagggagagtgcacagcgtcacctccaaatgccctggcttccccactcccactcagccttcccggactccacacccttggccttggcgtctctgtccacaagtcacctcgctcctcatgactgccgtcccagggccctcagggcaaggtcctctgcaggacgcccagggctccccaaaggcccaggcccacgctccttcctgtgttctgcggactggaccaccaagtgcaccctgcctggccgccccacccacagcgctctcccagaactctgccaggtgcagcgctcactgccagggccaggaccacctcctccctggagccatccctgctggtgtgggggcctcagccctctttctgtgcttcttttttggtgggcactgagggacactgaggcactgcggacaaaaggcccagcccagcttcactcccccttactcccatgcctcagtttccctggtggcatggagatcacagaatacttatctctggggaggggtgtgagggttccgtgggtgaatccacatccataggaggctctccgtccacacagcttctgttatgatcatttccttcgtcaccagcctcccatgcagtggcagcacctggcactcacagccccactggcttcttccaccatgcccgcctctgtgaccctcggctcctttgctccctcctctccccacctgaatcctcccaagtcctgtcccttttgagaagctcctggagtcatgagcgctctactgaggctgtggctgcctggacgtggttatagcgattgtccacagacttcagtttttgcccaggttccacccgcttgccctatgaagtctgtggtggagctgccatgagccacatgctcctgcctccctcccggtctctcagcctgcagcagtgcatgagcgtcctggtgccctcaagcaacagaaatggattctcccccagttctggaggccggaagtccaaaagcagggcgtgggcagggccgaagcgcctccaaagcatctcagagaggatgcatcctgcatcctccagcttctggtggtggctgccagtcctcgcgttcctcagcttgcagctgaccctctctaatctctgcctgttgtcacacgcccttctccctgtgtgtctgtgttctcacacggggcactcctctctgataaggaccccagtccttgactaagcccccaatccagtgtgaccagcgctgttccttgttgttctctccccacctccacctcatctctgcccaccccctgcctaggtgcaccaacatcttgaacagcaatggcgaactccggggctttcggcctcgggaccgggacgacatggtgaggaagatcatcgagccgatggcttgcgatggcctccgcaccatctgcatcgcctaccgggacttctctgcaggccaggagcccgactgggacaacgagaatgaggtcgtgggtgacctcacctgcatagctgtcgtgggcattgaggaccctgtgcggcccgaggtagccaccaccttctctgtgagctgccctggtaactgtgccctctgcccgagcttgtccggactggtaggggcggccttccttcacacacagctgctgcggtccctccgtagtacacttgagccccgtcctgggtgctctcaccctgacacccgcacaaaggctctgtcctgcctgctggaaagcccttcccgcttgacctatgggcccagctcaggctccaccttctaccaggtgagaaggtggcagtggcggagagaccgtcgacatttgggatctgatccacccaggaccgatggactggaggtggtgctgaagcctgaggggacacaggtttggggcacagggtgggcgtttattggttgagggtttggctggggctactctacggtcaggacgtcctgtggcgagctcacagcaaaggtcctggcgggaaagggagcccagaagcatatccccatatggacgatgccaccaggggagtccagatgaggggacctcgagggccgcgtggcagatgccatggccttgacactgggaagtcactttgttgttgaaagatcccagaccctggagagtgtggaggatggccggccccggagggagaatgcaaggcatggggtgcccctctgtctccccagggcctctgcatggcacccacctgtgtcacaagcagggccactgtgaccctgacaacttgtctttgtaggagccaccctgggggtgcaggtgcaacctgggaggagaagcttctgggctctccttcgggagacaggcattcatgtattggatcatgtagcaaaaacactcaattcaaagacagtgcgtctaaacgccagccatggctcatgtcaacagagcagccccgtgccccgaggagaacatggtcactgcgcccagagagggagcacctcgagcttgccctgggagaaaatgggtggtagcggaggacaggggacagaagtccagcgagggaaatgggccccgcaaaggcgggcagcggcatgagtcccgggccccactgagcctgggagagcagaaggagagggtgctggtgaggcgaagcaaggccacacttggggacaggagccatcgagtccctctgttggaccagggagcaactgaagcacagagcagaggaaggaatcttgccagaggggcctggggaatagggacagctcctttccagcttaagagtggctgagagagagtccaaggggtagaccacagtgacagggccaggctgcggaggctgggcagacccccacaaagactggccagcctggtggtggctgaggaggacgcacagaaggcccagcgaagtcctgggtgccggcaacaggcagtaggacacaagggcctcactgaaaccgccagggtgcttggagatgcggcacggctgcagccagaggagggcccgtgaggctgggccctggggagccataggaagcctgtggctggggtggtattgatgctggagctgggccggccgggggcactggcaacttctccagacacctggctggctgctgtgctgtggggccttggggagaaggcagggagcagggctgagcaggcgaggaaggacagcctggcctggccctttggggccatggggaaggaactgggctacacacactgggcctgaggagggaggaggcctgggttcgcagctgctggttttcaggctcgtcacggccacttggtggcagcagaggggtggcttccagacttttcagggacaggcattcgctggctcaaaggagaattgtcttcttgtggctcgtgatcttgttatccagcaccccaagatcctcagagagtacgaagtgtccccgaggctggcagtgaggccacttagtggtatatgctgcaggaaccattggatcaccctgtcacagcttagagtggggcccccagctgtctccctggcaaagatcacagcccccctgcccatggcctcagggggcgccaggattcagggactcccaggtcaatgtcctcccctggtgtctcccggctgccctacccctggctcccactcctgcgtgtctactccccaccgccgcaggctccccaggcctggcggctcggccacacctaggcttctacacttacccgacggtgctcacaagccccactgcctaggcttgacctcctcattcaggttcccaaactctgaacctggctcctcttctcctctccccctgcccgtctacctcagtggcatcagctgcctgaccctgtctctctgtccccgagcctgaagagccacatacctcttcatttgggaactgtcttccctgtccccccaccactgggacaatgccaccacctcccggccagtctcctggcttcccgctctcaaccccttgcaggctgttcgctttccactcagcactggggaacctctttctctttctccagaatctaatgtgatgcaggtggtccccaacttttaacaattttgtaacttggtgcaaaggtgatgcacattcagcagaaactttacttcgagtcccatgcttttccctttcagtgcaggattcaatgagttacatgagataatcagcactgtattccacaataggctttgtgttcaatgcttttgcccaactgtaggctaacacaagtgttctgagcacgtgaatcggatggctttactctcacctctgctggaccttgggccacctgcagatctgatggaggaaggggtactgcctcaacccaaaatacgtcttgcctcgatggccccgcccacctctcttgtctcttctaggtccctgaagctatccgaaaatgccagcgtgctggcatcacagtccgcatggtgactggggacaacatcaacacggcccgggccatcgcagccaaatgcggcatcatccagcccggggaggacttcctgtgcctagaagggaaggagttcaaccggcggatccgcaatgagaaaggcgaggtagcacccggctgtctgccaccccagaccccccttctcctcaccccagccccctgcgtgcccgccttagctctgcagcgtccttgtgcttcccctccccagatagaacaggagcggctggacaaggtgtggcccaagctgagggtgctggcccggtcgtctcccaccgacaagcacacactggtcaaaggtagccgagcccccacacccctttcctggggtggccagcccgaggttgtctgcttcctgacaccaaaagccaggttcccaaacaggtccccagggcctgcctaggaagctgggtccatttgtcccattagcccagagcagcagggcaggggcccatgagggaaccagggttcggggagggctagtgactcactccaagtcacacagtgagtctctagaagcagtgggtctagagccagggacccaggattgtgtccccaggccctaaccagatccctatcctcccaccctggccctgtcactcagtgagatttgcttacttatttggggataggagatgatccaggtgacggggagcacagataattgggacagtcaggacggggtaatcccaaagggttttcacagccaacctacccccatagctccctgggcagggctacacagggttgtggtgacagatggccccagccctgccctgccctgatctgtcttccagggattatcgacagcaccactggtgagcagcggcaggtggtggctgtgacaggggatggcaccaacgatgggccggccctcaagaaggcggacgtgggcttcgccatggtaagccacctggtgcccgcccagctcaccacggcagatggggcctgcatctgtcccatggacattagctttgtaccaggaagtgggagccagtgtcggggcaggttacagagtgcctgaaggttctttctttcacatcctggccacttgggcctgcgtgggctctgccagtcgggggacatgtggttaaaggcatctgctgtgatgcccaaggtgacagtgggccccagacatactgtggagaggaaggggaatggggggtgggggctcatcactgatggcattgcccacccccgtcctctctaaatggactctcagccccagatgaggtgagcagagtccccagatgtgctcttcctctgcacttccttcctgttgctcacccactgagcagggtagccctgcagacgccacccacatggctggttgcggcccctcagtggccccacagccactgaacgcagcaacctggtgagcccctctccctgccctaccgaaaaggagtgtcacccagggaacccagcccagtccttcccagcacccgtagcccagaagggagctccagcccaagcttcgagaggtggcagctctcacggggccaggcttggggcagaggagaggactgcgcagcttggcacagctgcagctgcgcctccatgggacagggactcctctgcaaggagccgccccgcccagggtgtccccatgcaggacttcccagggctccttagccagcaagcctctctggagtgctaagaacagaccacgctgcttggtggccacgtggtggcagctgggctttatgtgtaaagctgtgttgatgccatgtcatcagcaccctctgtgtttatgagcaaagcccccccccccaccgtgacatgtgacaacttactgtttgtagtacaagaatgtgttgcattaaaaaaaagcaacaaaaaacagtgctgttcttggctttggggggcggggtgggatgttattcagaaggggagagcagggagccagcccaggcgggccaggtgatcaaggggggctggggaaggggcccccacaaacactctgtgtgagtgtgtgtgtcacccccccagggcatcgcagggaccgacgtggccaaggaggcctccgacatcatcctgaccgatgacaacttcaccagcatcgtcaaggcagtcatgtggggccgtaacgtctatgacagcatctccaagttcctgcagtttcaactgacggtcaatgtggtggctgtgatcgtggccttcacaggtgcctgcattactcaggtgggtactgggggctgccatgccccagctaggacacctgggctcaggcctgagggccagattgtgagagtgagggttttgttttctttgctgcagattattttaattgagatcaaattcatatgccaaaaattcaccattttcaagtacataattcagcactcgaatttgtaggacattcaccacgttgtgcaaccattggctctatctagttccagaagattgtcatcatcttaaaaagaaaccctgtgctcttgagcagtcatttccccatttctcccccaaacatcccagcccccggcaaccactcacaggcttcctgggtctatggatttgcctgttccggacatttcattcctatgggatcaaataatatgtggcctcttgtgtctggcatctcgcttagcaccgtgttttcaggctcacacacaccgtagcatagggcaggactttctgccttttcatggcctcataacactccacggcacagactgccacattatgtatgtctgccctgatggacacatggctcgttcccactttttggctcttgtgaatggtgctgccaggagcatctgtgtatgagtttctgcgtgggctatgcgtcccatgggaaccctttctcaacagtcccattttccccattggtgagtgtccagattttcttcaccccgccttagaaagggggtgtttaaattgcctgctgatcaacttggtcttttcaaaacaattttttaaattgagataaaaaatcacataacaaacttcaacagaaccattttaaccttttgaaagtacataactccgaggtttatatccctccactgtctattcccagaacattctcatcaccccaaaaggacacccagaccccgtgagcagtcactctctactccccaaaccccagcccctggcacccactcatctgctttctctctctatggatttgtcagttctggaagtttcctatgaatggaatcagacagtacgtggccttgtgtgtctggcttctgtgaggctgatttttaacgaacaactcagaggagctgagaaggaaggtccagttcagagtttctgcctcctcctgcccctgaggtgcaggagacaaggagagcagccctcactctgttgccccaaatggcagaccccatcgtcgggctgttttgtggtctggggtttttcacctcctgcgagggatttggagcacacctgctgccaggtgagagaagggaggcgggcacgtgacagcccaaagaaaacgccccactagcgtaaaggcgatgtagggatggagatgtctgttttcatgggcatgaaatcctggtgatgtggaccccatgaggagcccccaggagctactgggtttccacccccaaccttcccgggcaggcggcccatggaaaggtgactgcctcctctccataggactctcctctcaaagccgtgcagatgttgtgggtgaacttgatcatggacacatttgcctctctggccctggcgacggagccacccacagagtcgctgctgctgcggaagccgtacggccgcgacaagcccctcatctcccgcaccatgatgaagaacattctgggccacgccgtgtaccagctcgccatcatcttcaccctgctgtttgtcggtaggctggccaggggcacccgggaggacttcaggacactgttgccaccacctcgggctcagattctgtctggtgtgtctccacctgtgtctccgcacccagtacggggtgggacgctgcacttcctgactggacagcacacaggggaaggagcagatgggccaggctagcaaccctgcagccaggcctgctggtggcctacagctctttcgcaagcctctcctcccaggccgctgagcagctgagaaacagttcatgtcttgacatcctgcccacggctgtgtagctgtgtagagtaggcagcttctacccagccccagagtggccacggtaaccctaggaacagaacagcccacatttaccctgtgaagattgctcctgtggagtgactggggtgccgtgctggaagctgtgaggtgggtggggggtgaccgcaagagagaggaagaggaggagggcgtccgaggaaagccagccttaagaacttcccttcttaatctcttccttcctgccctcaggctcagggtctggcccctggcccagaggggtctcaggactctggttggttgagcctggggtgggtgtggctgccttgggccttggccgtgagctggaagtggccatcccctgggacaagggacccatctcgggagctacacaccgaagtctcgctcctgagtaatgcgtcatgcgctgagatgactgtgcctgagtggggaatgttgctttccaggggagctcttcttcgacatcgacagcgggaggaatgcgcccctgcactcgccaccctcagagcactacaccatcatcttcaacacgttcgtcatgatgcagctctttaacgagatcaacgcccgcaagatccacggcgagaggaacgtgttcgacggcatcttcagcaaccccatcttctgcaccatcgttttgggcactttcgggattcaggtaggaggggcggctccactcttggcctctgccacttgcaaaaagtggaggtggtgggcttcaagacccctcgtccacccctagtactggcctccccacctccactcccagaaggagccccaccccacctggctttcctgtagcccccgtcctctctgcatgtcggagagggccttcttcatcttccaaacattgccggccttgccctgggtgagcgcgctggcttccagaagggtttcgtgagccctcatcggaacgaagttttctcacagatgctggaaggagtcctccctggctccctctaggtctgccattcccatttctagcacttaattccttggcatgaggctgccataactccagaagtttcttttggagatgacctctgtgcccagtgctgacacactaacctctgcttcccacagtgctgtggacaggctggtcagccccactgtctaggaggggctaagtgttctaaaatatagtgtatttgtagaaaaattgaggtatagtaaggccaaaaggtcaagagacagttgccactgaaagacagtttatgactcagagaccccaagaggaggacacatgccacaccataggggcccacatgggagagcgccaggcaggaggtggggtgtgagagctgtggacaagagcctttgctgtggttccctcggggaggagcaggtgaggcagggctggtaggctcaggactggctaggttgcgtcattgcagcggttccagggcatacgggtgctccctggctgtctggtacctggtcctgggtaatgagtgcaaggggatagtggcccggaatgtgacagtccaacagaggacggggtcagtttgcatttggacagcttgcccctgcaaattggatgcctcccgaggaggcaggaggccaagacaaggtgacctcggcaggttctagggtcctccagaatgaggcatgtccagcgtgcccgcagggtgggtgtcacagcctccgtcttgctgaaaataggagcatggtcagtggagctgggccccactccgaggctggagtcagtaggtgcctggcacccaggggcgctgggggccatgcactgctctgtcatcacgcccccggccttgtggtcctctcgcaaggagcagcccgtgcaactgggggaaccaaccagggtggctgggtcttcaaggggttggaggacaagggtggctcaggagccgcggctggacctgcctctctcccacttgcccttcgcagattgtcatcgtccagtttggcgggaagcccttcagctgctccccactatccacagaacagtggctctggtgcctgtttgttggtgttggggagctggtctggggacaggtgagtgacagccctgcccctcatttcagactgccctgcagacagcttctgtgatgggcccacttgccctaaccctgcttcagagccttggggtcctcaccctaggaagcacactgagggctcaggcctgtgacacaccaggacccagggacaggacgcaagggaaggtgtcagcaaaagaatgcaaaggaacatggctgggatgtgacagggcccaggaaaactgcccgcagctcccctttctatgataagagccaaaaattgccccttccaattgggtgggtagcttgggaaatccccacatattttaaatcaatcaaacagcaccctgatcaataatccatggggcgaaaagaaagtctccagagaaattaggaaatattttgacctgatggaaaggacagagagtcccacatcgagctctgtgggctgcagctgaagccgcacactggcaggtttctaggaccccacaattagatcaggaagaaacagcctgggtatttaggatc

SEQ ID NO: 1176 - DNA, 4361 bp, Homo sapiens
cttccccgccccacggaaaggggaggagcttgggctgtttgaatggctttgggatggagcaggggagagagtggctccgtttgcctccccgctttggtgatgctgtgcgagcggcttcgggggccctggagacgtccgagtcactgagggtgggctgggactcggggcccgcgtcccatctccccgccgattggtccgccccccgtgcgagtgtaacacagccagcctcgaagacttccctctgagttggaatgataatgaccgaatcccgagaagttatagacttagaccccccagctgagacttcccaggagcaggaagaccttttcatagtgaaggtggaagaagaagactgcacctggatgcaggagtacaacccgccaacgtttgagactttttaccagcgcttcaggcacttccagtaccatgaggcttcaggaccccgggaggctctcagccaactccgggtgctctgctgtgagtggctgaggcccgagctgcacacgaaggagcagatcctggagctgctggtgctggagcagttcctgaccatcctgcctgaagagttccagccctgggtgagggaacatcaccctgaaagtggagaagaggcggtggccgtgatagaaaatatacagcgagaacttgaggaacgcagacagcagattgttgcctgccctgatgtgcttcctcggaagatggcaacacctggagcagtgcaggagtcctgcagcccccatcccctgaccgtggacacccagcctgagcaagcgccacagaagcctcgtctcctggaggaaaatgcccttcctgttctccaagttccttcccttcccctgaaggacagccaggagctgacagcttcacttctctcaactgggtcccagaagttggtgaaaattgaagaggtggctgatgtggctgtatccttcatcctggaggaatgggggcatttggaccagtcccagaagtccctttatagggatgacaggaaggagaactatgggagtattacttccatgggttatgagtccagggacaatatggagctcatagtgaagcagatttctgatgactctgaatcacactgggtggcgccagaacacaccgaaaggagcgttcctcaggatccagactttgcagaagtcagtgaccttaaaggcatggtacaaaggtggcaggtcaaccccactgtggggaaatcaaggcagaatccttcccagaaaagggatctggatgcaatcacagacatcagccctaagcaaagcacacatggcgagagagggcacagatgcagcgattgtggcaaattcttcctccaagcctcaaactttattcagcatcggcgcatccacactggagaaaaaccgtttaagtgcggagaatgtgggaagagctacaatcagcgggtgcacctcacccagcaccagcgcgtccacacaggggagaaaccctacaaatgtcaggtgtgcggaaaggctttccgggtgagttcccacctggttcagcaccacagtgtccacagcggagagaggccctatggctgcaatgagtgtgggaagaacttcggtcgccattcgcatctgatcgaacacctaaaacgccacttcagggagaaatcccagagatgcagtgacaaaagaagtaagaacacaaaattaagtgttaagaagaaaatttcagaatattcagaagcagacatggaactatctggaaaaacccaaagaaatgtttctcaagttcaagattttggagaaggctgtgagtttcaaggcaagctggatagaaagcagggaattcccatgaaagagatactaggacaaccatcttcaaagaggatgaactacagtgaagtcccatatgtccacaaaaaatcctccactggagagagaccacataaatgtaacgagtgtgggaaaagcttcattcagagtgcacatcttattcaacatcaaagaatacacactggggagaaaccattcaggtgtgaggaatgtgggaaaagctacaaccaacgcgtgcacctaactcagcatcagcgcgtccacacaggtgagaagccctacacctgtcccttatgtgggaaagccttcagagtgaggtcccaccttgttcagcatcagagcgtgcacagtggggagagacccttcaagtgtaacgaatgtgggaaaggctttgggaggcgttcccacctggctggacatcttcgactccactcccgagagaaatcccatcagtgtcgtgaatgtggggaaatcttttttcagtacgttagcctaattgaacatcaggtgctccacatgggtcagaaaaatgaaaaaaatggcatctgtgaggaagcatatagttggaacttgacagtgattgaagacaagaagattgagttacaagagcagccttatcagtgtgatatctgtggaaaagcctttggttatagctcagacctcattcagcattacagaactcatacagcagagaagccctatcaatgtgatatatgtagagaaaatgttggccagtgttcccacaccaaacaacatcaaaaaatctactccagcacaaaatcccatcaatgtcatgaatgtggcagaggcttcactctgaagtcacatcttaatcaacatcagagaatccatactggtgagaaaccttttcaatgtaaagaatgtggaatgaatttcagctggagttgtagcctctttaaacacctgagaagccatgagaggacagatcccataaataccttaagtgtagaggggtctctgttgtagaatagctcttaattttagagaaaccttcctggagggaaaccatactcctataatgagcaaagtaacaacttcaagcatttttccagcgttaccatcaaactcacaaataggttgaaatcctttagttataactcagcctttaggaacaccggagaacccacaataatagaaatcttttcgtgttccccattgagaaatgctttagttagcatcttcatgcttggaaatctagacaagaagagaatccatggatggacatggtcgaggaattcggaaagcctgcagttgacattcagtcttcacttgaaactcaaaactgacactaggaacagcttcatgagttcagtagaagtaagctttatttgtagcttctgccttgtttgacggcgtatctattcagggaagcgcacagtaaaagaattccttagcatgatgtctgttttggtacctcagcaatgaaccttttctagaaattattattccaaccactagaataccctagtcactattcccactttgagcattaacccctttgaaaagaaatggacttaaagtatctctgttttggcaaaattcaggttcaggggctggatggtatgtgtttctgctgccttattcaatccaccacttctctgtgaaacactctaccttgtttttggtttgattctactgatgtcagggtttagccggtagaaggagtagttcagtttgtcaattcaggagaaactgtactggtcagtcacatcttacggcgaagggagagggaccttaggggagcagagaagacaggcaaagttgtggactgtttgatcttgtattacccacaggaatgagggcagctaaacccatagaaggagttggaccaaggcgaattacgagtcctggtcccagcagtatgtgtgctgacttctgggtgccccagaaatagacctctcctgtagagtggtgatatacagaatgagtttcagtttgcattgcagctgggattgaaagtaatcagtcgtgagcaggcaggcaggaggtcctgttagccctgccttccaggaaggttggggtgggagttttgagtgggaaagaggatgacatgtgtgagagagttctgagcctgtttgctagggagagtgagtgagtgctcttgggcactgctcaggccgtttctgctgacttgcctggcttacaataaatgcccaataaatatttgttgaccatatgtgttgtacactgtggtgccctgtccagtcccctctaccaagctgagacccccatccccagctgctctgagtttgggctgcaagtgctcacagctcttgttctccagaaactggagaattgccctcaggagatgagagccatctcacctcacccaggagtcacttcctctctacaccccaacacctggttcatttgattaaagcggagaaaactccagggtgctatgactgctctggcacccttggatcaggccaagctagactttttctgagccttcatccgtgctaagctctctcccttctctatcctgtttcattccctccctcaaaggcgtttcccaaataaatcacactgtcaatcaaaaaaaaaaaaaaaaaa

SEQ ID NO: 1177 - DNA, 1400 bp, Homo sapiens
agagacgtggcagcggagggataatcggggcggccggggctgaagggagaggcgcaggagccctggggagagtggtccctgcccttccgcgcctcgagccatcgctaccgcccttcggaaccagtgcagcggccgatcagtaaacacagagactggggatcgatcatggggctttgtaagtgccccaagagaaaggtgaccaacctgttctgcttcgaacatcgggtcaacgtctgcgagcactgcctggtagccaatcacgccaagtgcatcgtccagtcctacctgcaatggctccaagatagcgactacaaccccaattgccgcctgtgcaacatacccctggccagccgagagacgacccgccttgtctgctatgatctctttcactgggcctgcctcaatgaacgtgctgcccagctaccccgaaacacggcacctgccggctatcagtgccccagctgcaatggccccatcttccccccaaccaacctggctggccccgtggcctccgcactgagagagaagctggccacagtcaactgggcccgggcaggactgggcctccctctgatcgatgaggtggtgagcccagagcccgagcccctcaacacgtctgacttctctgactggtctagttttaatgccagcagtacccctggaccagaggaggtagacagcgcctctgctgccccagccttctacagccaggccccccggcccccagcttccccaggccggcccgagcagcacacagtgatccacatgggcaatcctgagcccttgactcacgcccctaggaaggtgtatgatacgcgggatgatgaccggacaccaggcctccatggagactgtgacgatgacaagtaccgacgtcggccggccttgggttggctggcccggctgctaaggagccgggctgggtctcggaagcggccgctgaccctgctccagcgggcggggctgctgctactcttgggactgctgggcttcctggccctccttgccctcatgtctcgcctaggccgggccgcagctgacagcgatcccaacctggacccactcatgaaccctcacatccgcgtgggcccctcctgagcccccttgcttgtggctaggccagcctaggatgtgggttctgtggaggagaggcggggtaatggggaggctgagggcacctcttcactgcccctctccctcaagcctaagacactaagaccccagacccaaagccaagtccaccagagtggctgcaggccaggcctggagtccccgtgggtcaagcatttgtcttgacttgctttcctcccgggtctccagcctccgacccctcgccccatgaaggagctggcaggtggaaataaacaacaactttattaaaacaccaaaaaaaaaaaaaa

SEQ ID NO: 1178 - DNA, 3241 bp, Homo sapiens
gcggccgccgggagggcgcgcggcgccggagacatgtccaggcggaaacagagcaacccccggcagatcaagcgttccctcggagacatggaggccagagaggaggtgcagttggtgggtgccagccacatggagcaaaaggccacggcacctgaagccccgagccctcccagcgcagatgttaactcacccccaccgctgccgccccccacatccccaggaggccccaaggagctggaaggacaggaaccagaacccaggcccacggaggaagagccgggcagtccctggagcgggccagacgagctggagccggtggtgcaggatgggcagaggcgcatacgggcccgactcagcctcgccacgggcctgtcctggggcccgttccatgggagtgtccagaccagagcctcatcccccaggcaggcggagccgagcccagccctgaccctgctgctggtggacgaggcctgctggctgaggacgctgccccaggccctgactgaggccgaggccaacacagagatccacaggaaggatgacgcactctggtgcagggtcaccaagccggtgcctgcggggggactcctgagcgtgctcctcacggccgagccccacagcacccccggccaccctgtgaagaaggagccagcagagcccacgtgcccggcccctgcacacgacctccagctcctgccccagcaggccgggatggcctccatccttgccaccgcagtgatcaacaaagacgtcttcccctgcaaggactgtggcatctggtaccgcagcgagcgcaacctgcaggcgcacctgctctactactgcgccagccgccagggcaccggctccccggccgcagccgccacagacgagaagcccaaagagacctaccccaacgagcgcgtctgccccttcccccagtgccgcaagagctgccccagcgccagctccctggagatccacatgcgcagccacagcggagagcggcccttcgtgtgcctgatctgcctgtcggccttcaccaccaaggccaactgcgagcggcacctcaaggtgcacacggacacgctgagcggtgtctgccacagctgtggcttcatctccaccacaagggacatcctctacagccacttggtcaccaaccacatggtctgccagcctggctccaagggtgagatctactcgccaggggccggacacccagcaaccaagctgcccccagacagtctgggcagcttccagcagcagcacacggccctgcaaggccccctggcctccgcggacctgggcctggcgcccaccccatcgccaggactggacagaaaggccctggccgaggccaccaacggagaggccagagcggagcctctggcccagaatggaggcagcagcgagcccccggcggcccccaggagcatcaaggtggaggcggtggaggagccggaggcggcccccatcctgggccccggagagcctgggccccaggccccgtcgcggacgccgtcgccgcgcagccccgccccggccagggtcaaggccgagctgtccagccccacgccgggctccagcccggtgcccggcgagctgggcctggccggggccctgttccttccgcagtacgtgttcgggcccgacgcggcgccccccgcctcggagatcctggccaagatgtccgagctggtgcacagccggctgcagcagggcgcgggcgcgggcgccggcggcgcgcagaccgggctcttccccggggcccccaagggcgctacgtgcttcgagtgcgagatcaccttcagcaacgtcaacaactactacgtgcacaagcgcctctactgttcaggccgccgtgcgcccgaggacgcgcctgccgcgcgcaggcccaaggcgccccccggcccggcccgcgcgccccccggccagcccgccgaacccgacgcgccgcgctcgtccccgggccccggagcgcgcgaggagggggctgggggcgcggccacgcccgaggacggcgcgggcggccggggcagcgagggcagccagagcccgggtagctccgtggacgacgcggaggacgaccccagccgcacgctgtgcgaggcctgcaacatccgcttcagccgccacgagacctacaccgtgcacaagcggtactactgcgcctcgcgccacgacccgccgccgcgccgaccggccgcgcccccgggaccccctgggccggccgcgcccccggccccctctcccgccgcgcctgtgcgcacgcgcagacgccgcaagctctacgagctgcacgcggccggcgccccgccccccccgccgcccggccacgcccccgcgcccgagtcgccgcggcccggaagcggaagcggaagcggccccggcctcgcccctgcgcgctcgcccggccccgcggccgacggccccatcgacctgagcaagaagccgcggcgcccgctccccggagccccggcaccggcgctggccgactaccacgagtgcacggcctgccgcgtgagcttccacagcctcgaggcctacctggcgcacaagaagtactcgtgccccgctgcgccaccgcccggcgcgctcggcctgcccgccgccgcctgcccctactgccccccgaacggcccggtgcgcggggacctgctggagcatttccgcctggcgcacggcctgctgctcggcgcgcccctggccggcccgggggtcgaggcccggacgccggccgaccgcggcccctcgcccgctcccgcccccgccgcctccccgcagcccgggtcccgtggcccccgggacggcctcggcccggagccccaggagccgccgcccggcccgcccccgtccccggccgccgcgcccgaggccgtgccgcccccgccggcgcccccctcctactcggacaagggcgtccagactcccagcaagggcacgccggcgccgctgcccaacggcaaccaccggtactgccgtctttgcaacatcaagttcagcagcctgtccaccttcatcgcccacaagaagtattactgctcctcgcacgccgccgagcacgtgaagtgagcgcccacactacagccgcagacgctttgcacgccccgctgcgatgcggggagggggccgcccccaggccgcacggactgccgctcctgggaaccccgccacgcacaggcctcggcggagggggccgcagggggcagcgcccgcctggacccttggcacttaataaagaagttcagtttgatgagca

SEQ ID NO: 1179 - DNA, 4507 bp, Homo sapiens
cagcggcagcagccgccgccgagatgtcccggcgaaagcaaagcaaaccccggcagatcaaacggccgcttgaagatgccattgaagatgaggaagaagaatgtccatcagaggaaacagacatcatctccaaaggagactttccattggaggaaagcttttccacagaatttgggcctgaaaatctgagctgcgaagaagtggaatacttttgtaacaaaggtgatgatgaaggaatccaggagacagcagaatcagatggggacacacagtcagagaaaccggggcaacctggagttgagacagacgactgggatggaccaggagagctggaggtgtttcagaaagatggggaacgaaaaattcagagtcgacagcaacttccagtgggaacaacctgggggccgtttcctgggaagatggacttgaataataattctttgaagacaaaggctcaggtcccaatggtgctgactgctggtcccaagtggttgctggatgtgacttggcaaggagtggaagacaacaaaaacaactgcattgtgtacagcaaagggggtcagctttggtgtacaactacgaaggccatctctgagggtgaagagctaattgcctttgtggtggattttgactcaaggctacaagctgccagtcagatgactctcacagaagggatgtaccctgcacgcctgctggactcaattcagctgcttcctcagcaagctgccatggcttctattttgcccacagctattgtcaataaggatatattcccttgcaagtcctgtggcatctggtatcggagtgagcggaatctgcaggcccatttgatgtactactgcagtgggaggcaaagagaagctgctccggtgtcagaggaaaatgaagacagtgcccatcagatttccagcctgtgccccttcccacagtgcaccaagagcttttcaaatgctcgagctctagaaatgcacctgaattcacacagtggagtgaaaatggaagaattcctgccccctggtgctagtctaaaatgcaccgtctgtagctacactgctgattccgtgatcaactttcaccaacacctgttctcccatctcactcaagctgccttccgatgtaatcactgccatttcggcttccagactcagagggagttattgcagcaccaggagctccatgtccctagcggcaaacttcccagagaaagtgacatggaacactctccaagtgcaactgaagacagcttacagccagccacagacttattgaccagaagcgaacttccccagagccaaaaggccatgcagactaaagatgcgagctctgacacagagctggacaagtgtgagaaaaagactcagctctttctcacgaaccagagaccagagatacagcctacaacaaataaacaaagcttttcttacacaaaaataaagtctgagccctctagcccaagacttgcctcatctccagttcagcctaatattgggccttctttccctgtgggccctttcctatctcagttttctttcccccaagatatcaccatggtccctcaagcttcagagatcttagctaagatgtctgaactggtgcatcggcgactgaggcatggcagtagtagctaccctcccgtcatttacagccctttgatgcccaagggggctacttgttttgagtgtaacataacattcaataatttggataattatctagtgcacaaaaagcattattgcagcagccgatggcagcagatggctaagtccccagagttccctagtgtgtcagaaaagatgcctgaagctttgagtcccaacactggccaaacctccataaaccttctcaacccagctgctcattctgctgatcctgagaatccacttcttcaaacatcttgcatcaattcttccactgtcttagatttaattgggccaaatgggaagggccatgacaaggacttttccactcaaactaagaagctctccacctccagtaacaatgatgacaaaattaatggaaaacctgttgatgtgaaaaatcccagtgtccccttagtggatggggaaagtgacccaaataagactacctgtgaagcttgcaacattaccttcagccggcacgaaacatacatggtccacaaacagtattactgtgctacacgccacgaccctccactgaagaggtctgcttccaacaaagtgcctgccatgcagagaaccatgcgcacacgcaagcgcagaaagatgtatgagatgtgcctacctgagcaggaacaaaggcctccactggttcagcagagatttcttgacgtagccaacctcaataatccttgtacctccactcaagaacccacagaagggctaggagagtgctaccacccaagatgtgatatctttccaggaattgtctctaaacacttggaaacttctctgacgatcaacaagtgtgttccagtttccaaatgtgatactactcattccagtgtttcctgcctagagatggacgtgcccatagatctcagcaaaaagtgtttatctcagtctgagcggacgaccacgtctcccaaaaggctgctggactatcacgagtgcactgtgtgcaagatcagtttcaataaggtagaaaactatctggcccacaagcagaatttctgcccggttactgcacatcagcgtaatgacctgggtcaactggacggcaaagtgtttccgaatccagaaagcgaacgaaacagccctgatgtcagctacgaaagaagcataataaaatgtgagaaaaatgggaatttgaagcagccttcccccaatggaaacttattttcatcccacctagcaaccctgcaaggcttgaaggtctttagtgaagctgctcagctcattgctacaaaagaagaaaacagacatttgtttcttccacaatgcctttaccctggagcaataaagaaagcaaaaggagccgaccagctttctccatattatggaatcaagccaagtgattatatttctggttctcttgtcatccataacactgacatcgagcaaagcagaaatgcagaaaatgaatctcctaaaggccaggcttcctcaaatgggtgtgctgcgctgaagaaagattctctgccattgttgcccaaaaatcgaggaatggtaatagtgaatggtggactgaaacaagatgagagacctgctgccaacccacagcaagagaacatttcccagaatcctcagcacgaagacgaccacaaatctccctcgtggatctctgagaacccattagctgccaatgagaatgtctcaccaggaattccctcagcagaggaacagttgtctagtatagcaaaaggtgtgaatggttccagccaggctccaaccagtgggaaatattgccggctatgtgatatccagttcaacaacctttcaaactttataactcacaagaagttttattgctcatcacatgcagcagaacatgtcaaatgaactaactaaacatcagtcacctttggtatcagtgtttagtatgttgttctaaccagtccagaaaaaaaaataagctgtttgaattacatctgggcaatcaggagataattcattatggctgagttgaagacttaaggtgtaatttcattacagtccattagtaaagtgtattattggtgccattttcaaaaaaattaatttattttaccagcagtattcatagctgtggttatgttattttttatttaaaaactttatattaaagtcatttgtaatgttattgtatagttattgtgtagcacatatggtttgcactgtatagtagcttttaaagaaaatagtcacaatacagaaaagcattttagaaatagcttcaaaagcacttgtgtatcttgattttttcttatatgctgttgcagatatatgtatatgctaaaatataacttgcaaagatgttctaaatacacatgctataagttcgccttaagatttcaattcttggataatcaggctctgtttgcactttatattttagcagatacagtctcttagtcactaggctttgcatttgtatgtagctgtatgtttccgtccattttcttaatcctgaacctgtatgttaaatgaagatggcaatttttttcttgtatagtacttgtattttctttcgctgatgcagctctgtctcaatttttaaacctttgctgttaaatgcaatactttataaagaatgaacaaaattactggaagcagtattgtaagtaatgaggtagtattaatcagttttatcttttgaaaggcacagtctaaatcgaaaccctaaactcaatgctgcaagtatgaatttaattcatatataagatctatttaaatataagagtagcaatactgcacctggtgatcacaaagataatgttctacttctgatagaaataatttctcaacaaatgttgttactatgcatgtatatggatggaataaaattccagattgttggagaaaaaaaaaaaaaaaaaaaaaaaaaaaaa

SEQ ID NO: 1180 - DNA, 4746 bp, Homo sapiens
gttctccgctgaggaggagcggggcagaggagggaggcagcgggtgagagttcagagttcagcagcagcagcccgagcccatgattcccatatgccctgtagtttctttcacctatgtgcccagccggctgggggaagatgccaaaatggcgaccggcaactactttggattcacccacagcggggcggcggcggcggcggctgcggcccaatatagccagcagccagcttcgggtgtagcctattctcatccaactacagttgctagctacactgtccatcaggctccagtagctgctcacacagttactgctgcctatgcaccagcagccgccacagttgcagttgccaggcctgctccagtagctgttgcagctgctgcaacagctgctgcttatggaggctaccccactgcacacacagcaactgactatggttatactcagaggcaacaagaagcaccaccaccaccacccccagctactacacaaaactaccaggattcatactcatatgtaaggtccacagctcctgctgtagcttatgatagtaagcaatactaccaacaaccaacagcaactgctgctgctgtagctgccgctgcccaacctcagccttctgttgctgaaacttactatcagacagcccccaaagcaggttacagccaaggtgcaactcagtatactcaagcccagcaaactcgacaagtgacagccataaaaccagccacaccaagtccagctaccactactttctccatctatcctgtatcctccaccgtacagccagtagcagctgcggctactgtggtgccatcctatactcagagtgctacttacagtaccacagcagttacatattctggtacgtcttattcaggttatgaagcagcagtgtattcagctgcatcttcctactatcaacagcagcagcagcaacagaagcaggcagcagcagcagctgctgctgctgctgcaacagctgcctggacagggaccacctttactaaaaaagcaccattccaaaataaacaactgaaaccaaaacagcctcccaaaccaccacagattcactattgtgatgtttgtaagatcagctgtgctggaccacagacttataaagaacatttagaaggacagaaacataaaaaaaaagaagctgcattgaaagcctcacaaaataccagcagcagcaacagttctactcgtgggactcaaaatcagctacgttgtgagctctgcgatgtgtcttgtacaggagcagatgcgtatgctgcccacattcgtggtgctaagcatcagaaagtggttaagttacacacaaaacttggtaaacccattccatcaacagaaccaaatgttgttagccaagctacttcttcaacagctgtatctgcttcaaagccgactgcctctccttcaagcattgcagcaaacaattgtactgtgaatacgtcatcagttgcaacgtcttcaatgaagggtcttacgactacaggaaactcgtctcttaatagcacatctaacactaaagtatcagcagtgcctacaaatatggctgccaagaaaacatctacccccaaaataaattttgttggtggtaataagctgcagtcaacaggaaataaagcagaagacataaaaggaaccgaatgtgttaaaagtactcctgtcacttctgctgtgcagattcctgaagtaaagcaagacacagtgtcagaaccagtcacacctgcatctcttgctgctttacagagtgatgtgcagccagtgggccatgattatgtggaagaggtacgaaatgatgaaggaaaagtaattcggttccattgtaaattatgcgagtgcagctttaatgatcccaatgctaaggagatgcacttaaaagggcgaagacacagacttcaatataaaaaaaaagtaaatccagatttgcaagtagaagtaaagcctagtattcgagcaagaaagattcaagaagagaaaatgaggaagcaaatgcagaaggaggagtactggcgaagacgagaagaagaggagcgttggagaatggaaatgagacgttatgaagaggacatgtactggaggagaatggaggaagaacaacatcattgggatgatcgccgccgaatgccagatggaggttatcctcatggtcctccaggcccattaggccttctgggagtccgaccaggcatgcctcctcagcctcaggggcctgcacccttacgtcgtcctgactcatctgatgaccgttatgtaatgacaaaacatgccaccatttatccaactgaagaggagttacaggcagttcagaaaattgtttctattactgaacgtgctttaaaactcgtttcagacagtttgtctgaacatgagaagaacaagaacaaagagggagatgataagaaagagggaggtaaagacagagctttgaaaggagttttgcgagtgggagtattggcaaaaggattacttctccgaggagatagaaatgtcaaccttgttttgctgtgctcagagaaaccttcaaagacattattaagccgtattgcagaaaacctacccaaacagcttgctgttataagccctgagaagtatgacataaaatgtgctgtatctgaagcggcaataattttgaattcatgtgtggaacccaaaatgcaagtcactatcacactgacatctccaattattcgagaagagaacatgagggaaggagatgtaacctcgggtatggtgaaagacccaccggacgtcttggacaggcaaaaatgccttgacgctctggctgctctacgccacgctaagtggttccaggctagagctaatggtctgcagtcctgtgtgattatcatacgcattcttcgagacctctgtcagcgagttccaacttggtctgattttccaagctgggctatggagttactagtagagaaagcaatcagcagtgcttctagccctcagagccctggggatgcactgagaagagtttttgaatgcatttcttcagggattattcttaaaggtagtcctggacttctggatccttgtgaaaaggatccctttgataccttggcaacaatgactgaccagcagcgtgaagacatcacatccagtgcacagtttgcattgagactccttgcattccgccagatacacaaagttctaggcatggatccattaccgcaaatgagccaacgttttaacatccacaacaacaggaaacgaagaagagatagtgatggagttgatggatttgaagctgaggggaaaaaagacaaaaaagattatgataacttttaaaaagtgtctgtaaatcttcagtgttaaaaaaacagatgcccatttgttggctgtttttcattcataataatgtctacattgaaaaatttatcaagaatttaaaggatttcatggaagaaccaagtttttctatgatattaaaaaatgtacagtgttaggtattatttgaatggaaagacacccaaaaaaaaaaatgtgctccgactagggggaaaacagtagttccgattttttcccattatttttattttattttctggttgccctagcttccccccctatttttgtgtcttttattaactagtgcattgtcttattaaatcttcactgtatttaatgcaggatgtgtgcttcagttgctctgtgtattttgatattttaatttagaggttttgtttgctttttgacactagttgtaagttactttgttatagatggtatcctttaccccttcttaatattttacagcagtacgtttttttgtaacgtgagactgcagagtttgtttttctatatgtgaaggattacaacacaaaaagttatcctgccattcgagtgctcagaactgaatgtttctgcagatcttgtggcatttgtctctagtgtgatatataaaggtgtaattaagacagagttctgttaatctaatcaagtttgctgttagttgtgcattagcagtataaaagctaatatatactatatggtcttgcaacagttttaaagcctctgcataattgataataaaaatgcatgacattcttgtttttaatagacttttaaaatcataattttaggtttaacacgtagatctttgtacagttgactttttgacatagcaaggccaaaaataactttctgaatatttttttcttgtgtataagtggaaagggcatttttcacatataagtgggctaaccaatattttcaaaagaacttcatcattgtacaactaacaacagtaactagcccttaattatggtgacagttccttattggtgtgtgtgagattactctagcaactattacagtataacacagatgatcttctccacacaccccatcacccagataatttacagttctgttaacagtgaggttgataaagtattactgataaaaaattatctaaggaaaaaaacagaaaattatttggtgtggccatcttacctgcttatgtctcctacacaaagctaaatattctagcagtgatgtaatgaaaaattacatcttactgttgatatatgtatgctctggtacacagatgtcattttgttgtcacagcactacagtgaaatacacaaaaaatgaaattcatataatgacttaaatgtattatatgttagaattgacaacataaactacttttgctttgaaatgatgtatgcttcagtaaaatcatattcaaatttaaaaaaaaaaaaaaaaaaaaaaaaaaaaaaaa

SEQ ID NO: 1181 - DNA, 5811 bp, Homo sapiens
gtccgtccggttcttgctatattgccccaggctggtctcgaactcctgggctcaagccgttctcccgcctcccactgcccgcctgtcactgccgtctgttccctgagctgtgctttacgctgggaaagacatagaagaactattaagaagatagaattgttttgctgcgcagtacagcaacagtggatgttcaagattaagattagagtcaagttgtgtgattaagacaggagctgtgactgatgagaattaaaggccatggatgaagatgggcttgaattacaacaagagccaaactcattttttgatgcaacaggagctgatggtacacacatggatggtgatcaaattgttgtggaagtacaagaaactgtttttgtttcagatgttgtggattcagacataactgtgcataactttgttcctgatgacccagattcagttgtaatccaagatgttattgaggacgttgttatagaagatgttcagtgcccagatatcatggaagaagcagatgtgtctgaaacggtcatcattcctgagcaagtgctggactcagatgtaactgaagaagtttctttagcacattgcacagtcccagatgatgttttagcttctgacattacttcagcctcaatgtctatgccagaacacgtcttgacgggtgattctatacatgtgtctgacgttggacatgttggacatgttggacatgttgaacatgtggttcatgatagtgtagtggaagcagaaattgtcactgatcctctgactaccgacgtagtttcagaagaagtattggtagcagactgtgcctctgaagcagtcatagatgccaatgggatccctgtggaccagcaggatgatgacaaaggcaactgtgaggactaccttatgatttccttggatgatgctggcaaaatagaacacgatggttcttctggaatgaccatggacacagagtcggaaattgatccttgtaaagtggatggcacttgccctgaggtcatcaaggtgtacatttttaaagctgaccctggagaagatgacttaggtggaactgtagacattgtggagagtgagcctgagaatgatcatggagttgaactgcttgatcagaacagcagtattcgtgttcccagggaaaagatggtttatatgactgtcaatgactctcagccagaagatgaagatttaaatgttgctgaaatcgctgacgaagtttatatggaagtgatcgtaggagaggaggatgctgcagcagcagcggcagccgccgccgtgcacgagcagcaaatggatgacaatgaaatcaaaaccttcatgccgattgcatgggcagcagcttatggtaataattctgatggaattgaaaaccggaatggcactgcaagtgccctcttgcacatagatgagtctgctggcctcggcagactggctaaacaaaaaccaaagaaaaggagaagacctgattccaggcagtaccaaacagcaataattattggccctgatggacatcctttgactgtctatccttgcatgatttgtgggaagaagtttaagtcgagaggttttttgaaaaggcacatgaaaaaccatcccgaacaccttgccaagaagaaataccgctgtactgactgtgattacactaccaacaagaagataagtttacacaaccacctggagagccacaagctgaccagcaaggcagagaaggccattgaatgcgatgagtgtgggaagcatttctctcatgcaggggctttgtttactcacaaaatggtgcataaggaaaaaggagccaacaaaatgcacaagtgtaaattctgtgaatacgagacagctgaacaagggttattgaatcgccacctcttggcagtccacagcaagaactttcctcatatttgtgtggagtgtggtaagggttttcgtcacccgtcagagctcaaaaagcacatgagaatccatactggggagaagccgtaccaatgccagtactgcgaatataggtctgcagactcttctaacttgaaaacgcatgtcaaaactaagcatagtaaagagatgccattcaagtgtgacatttgtcttctgactttctcggataccaaagaggtgcagcaacatgctcttatccaccaagaaagcaaaacacaccagtgtttgcattgcgaccacaagagttcgaactcaagtgatttgaaacgacacataatttcagttcacacgaaagactacccccataagtgtgacatgtgtgataaaggctttcacaggccttcagaactcaagaaacacgtggctgcccacaagggcaaaaaaatgcaccagtgtagacattgtgactttaagattgcagatccatttgttctaagtcgccatattctctcagttcacacaaaggatcttccatttaggtgcaagagatgtagaaagggatttaggcaacagagtgagcttaaaaagcatatgaagacacacagtggcaggaaagtgtatcagtgtgagtactgtgagtatagcactacagatgcctcaggctttaaacggcacgttatttccattcacacgaaagactatcctcaccggtgtgagtactgcaagaaaggcttccgaagaccttcagaaaagaaccagcacataatgcgacatcataaagaagttggcctgccctaacaatacttctacagaacgtttgtagagatattggccttgaagcagaaaattcattttaaagccaatcagtctcattcacatacaatactgtatattgatttatgctgtgtacaaatagaattattacttctagttgacttttttttaaatatacattttgctcagtagtgtgttctgaattctattcagtttgtttaataaatagggaaaactggcaacatgctagttacttttaataaagtaatccctgattctataccgaagttttatatcttagaattttatatttatttaaatatttaccttgcttaccttgatggtactcttctaagaccattaacttaaggtaactttatattggtaactctgaaagtattcatgttgactcatttttttccccatacatttctcacaataaaattgtcagagacatctactaatataaatgggagattttacagtcaggtctaattatcataacatggaagtcatttacttgtcttgcttaatattttcagaccacttgacagtgaaagtttccatttgagctgttgcgtccctggctttgctgagtaaagagcagtggctgggttcgtgtttacttttcaaatatacttcttttggctttctttggattatttacatcttttgtcagcgtagcaaacttttagaaaaccttattgaaaaactgtgcttgctcatgttgtattttgattattctgtctgtgcggcttcatcttggaatggttgtgtgctacaaatgacacttactgaggactgcattttggaatctcctagaggtaactcatggcttataggatcttttgcaactttatgtatgtaaatgtaccctgaattatatatatacacatatatatcatgtacctgtgtgtattgcttattttacatatttatacacacaaccccaagtagtagttgtttaaaatctataatgaaaagtattaaatttacaataacatgaaagatccagggatgcatgagagagcattttgtaagtcatgctcttcagagagactactcaggtgaagaattagaaggaaaataaggacactagtatttttaaagagtaaagatattttcttttaaatatctttggtaattgaaacatagaggttaagatgtttctaggtagaatgttttcatacaatttcacctccatgtctttatgtttttctgaaaagcaaatgagtatccagacatgactcccacagttctctttgagaagcctgagagggaactctgtcttacctagtgagggggatggaaaagaagtgatggctctgtggaccagagaacgggtgctaattatgacttcacactcggcaagttcaggctgatctgttatttctcagttacagttagcaaactttaaaaacttaacactcaagttggctttgattaaaaggtaaagatgtgttttaagtggataaggaaagtctgaggccttatttggaacatcactaagtcttccacaggttttttgtttgtttgtttttttttgttgtttttttttcttaagacggagtcttgctctgttgcccaggctggactgcagtggtgtgatcactgcaacctctgcagctcactgcaacctctgcttcctgggttcaagcaattatctgcctcagcctctcgagtagctgggattacaggcgcccaccaccacgcccggctaattttttgtatttttaatagagatggggtttcaccatcttggccaggctggtcttgaaccctgacctcgtgatccacctgcctcggccttccatagtgctgggtttacaggcgtgagccaccgtgcccagacaccacataggtctgaatcagtgtcatacattcataaaacaaactcggttaattagaacttggttatgttaagacgaatctgggagaacagaaaacagtttttggggtcccttcagttggctattggtccgtatgcatctagcacattgtaggagatttagaaattgtcttcccacccgatagctgccttgtcacctcattatggtgctccatcccctgtgtgcttaggtttttacctttcatctttctctttgccattgatgtttgtattcaagagttatatttttagggttagaaatcaaaatatttggtgtttggcaaacctctgaagtgctagactgatttagtctagttttaaaccaagtgctttaggcaggtgtgaactccagcccaaatgccagtcaaagtcaaggcatgggttttcctagcctatcttataggaaattcctgtaccttcttggcccccataatgtgttttttttttttttttttttttaaactaacttacaattttgtgatccgtgattcattgccctgcgattcttgaaagctctgtctgtttttttgtgagaacctttaaaatctcccttaatttttattttcccagaaataatgtaaaaacacttaaatgaaagtggaaatgtattaattttaaatcctataaaattaatacagaaaatataaatgattgggtcatttaactatatttttttaaataaactgaaagataaagaacacaacacttcacacattttatatttctcttacatactccggaatcatacacagttctttttaaagcacaacattaaaacctttaaaaggtatttaagggtttggtcaagtgaatatgataaaacatacttgtctgtataaagagaaaatgaaattgtagtcactgttatgtactgacattagttacaacctagttttaattcttaaaacaattttgattagcaaagctaaaaaaaaatggatgtttcagttaaatgttttaaagaggtacagatttttacaaggacataatataagttattgttctgtagaaatatcctattaaatattgtatgtccctccctctgtacactttgtaaagaaagtaaaatacataaaaagaaaatcatatagggatgtgtgacattattgtaattgtgtacttgagaataacgtgcaaaaataaaaatcagaatattttcctgttattgaatgtttagtctatttgataccagtactaagttaatgctttttctcaaggaaaaaaaatgtacagtttttgtaaacctaataaacatcaaaagcagtggatta

SEQ ID NO: 1182 - DNA, 5259 bp, Homo sapiens
gcctagtgcgcgcgcagtaacctgtttgtggcctggtcggcgtcccgtagggcgccctcccgcgctaggccggccggcgtggcgctcggcgccgaacaggccccgaggaggccgcagttaggcctagtgattatccagttgccctgagcggctgcggaggtgcgctccataagcgggcagggtgggaaaagttcgcccgtttgtccggaaggcagttgatggacctggggtcgacaccactgcggacgcagggcacggcacgggggcgagaaggcgaaggctgcaggcgtgaggagctgtgactaatgagaattaaaggccatggatgaagatgaatttgaattgcagccacaagagccaaactcattttttgatggaataggagctgatgctacacacatggatggtgatcagattgttgtggaaatacaagaagcagtttttgtttctaatattgtggattctgacataactgtgcataactttgttcctgatgacccagactcagttgtaatccaagatgttgttgaagatgttgtcatagaggaggatgttcagtgctcagatatcttagaagaggcagatgtatctgaaaatgtcatcattcctgagcaagtgctggactcagatgtaactgaagaagtttctttaccacactgcacagtcccagatgatgttttagcttctgacattacttcaacctcaatgtctatgccagaacatgttttaacgagtgaatccatgcatgtgtgtgacattggacatgttgaacatatggtgcatgatagtgtagtggaagcagaaatcattactgatcctctgacgagtgacatagtttcagaagaagtattggtagcagactgtgcccctgaagcagtcatagatgccagcgggatctcagtggaccagcaagataatgacaaagccagctgtgaggactacctaatgatttcgttggatgatgctggcaaaatagaacatgatggttccactggagtgaccatcgatgcagaatcagaaatggatccttgtaaagtggatagcacttgtcctgaagtcatcaaggtgtacatttttaaagctgaccctggagaagatgacttaggtggaactgtagacattgtggagagtgaacctgaaaatgatcatggagttgaactacttgatcagaacagcagtattcgtgttcccagggaaaagatggtttatatgactgtcaatgactctcaacaagaagatgaagatttaaatgttgctgaaattgctgatgaagtttatatggaagtgatcgtaggagaggaggatgctgctgttgcagcagcagcagctgctgtgcatgagcagcaaattgatgaggatgaaatgaaaaccttcgtaccaattgcatgggcagcagcttatggtaataattctgatggaattgaaaaccggaatggcactgcaagtgccctcttgcacatagatgagtctgctggccttggcagactggctaaacagaaaccaaagaaaaagagaagacctgattccaggcagtaccaaacagcaataattattggccctgatggtcatcctttgactgtctatccttgcatgatttgtgggaagaagtttaagtcgaggggttttttgaaaagacacatgaaaaaccatcctgaacaccttgccaagaagaagtaccactgtactgactgtgattacactaccaataagaagataagtttacataaccacctggagagccacaagctgaccagcaaggcagagaaggccattgaatgtgatgagtgtgggaagcatttttctcatgcaggggctttgtttactcacaaaatggtgcataaggaaaaaggggccaacaaaatgcacaagtgtaaattctgtgaatatgagacagctgaacaggggttattgaatcgccacctcttggcagtccacagcaagaactttcctcatatttgtgtggagtgtggtaaaggtttccgacacccgtcggaactgagaaagcacatgcgaatccataccggcgagaagccataccaatgccagtactgtgaatataggtctgcagactcttctaacttgaaaacacatataaaaacaaagcatagtaaagagatgccattcaagtgtgacatttgtcttctgactttctcagataccaaagaagtgcagcaacatactcttgtccaccaagaaagcaaaacacatcagtgtttgcattgcgaccacaagagttcaaactcaagtgatttgaaacgacatgtaatttcagttcatacgaaagactatcctcataagtgtgagatgtgcgagaaaggctttcacaggccttcagaacttaagaaacatgtggctgtccacaaaggtaaaaaaatgcaccaatgtagacattgtgactttaagattgcagacccatttgttctaagtcgccatattctctcagttcacacaaaggatcttccatttaggtgtaagagatgtagaaagggatttaggcaacaaaatgagcttaaaaagcatatgaagacacacagtggcaggaaagtatatcagtgtgagtactgtgagtatagcactacagatgcctcaggctttaaacggcacgttatttccattcatacaaaagactatcctcatcggtgtgagtactgcaagaaaggcttccgaagaccttcagaaaagaaccagcacataatgagacaccataaagaagttggtctgccctaacagtgtgtctacaagcttgtaaagatgttggccttgaagcagaaaattcattttttaaagccagtcttgttcacatccattactatacattgaattatgctgtgtaaaaatagaattattgcttctagtccacttttctttacattttattcaatacgctgtcctgaatcctattcagtttctttaatagatgaggaaaaatagcaacaagcaagttgcttataataaaataatttgtgattctatactgaattttcagtcataaaagctttactatttatttacatatttattcatgttcatggtactcttctaagacaaaatcagattgataactatgaaagtaacatttttgacccatttcctcctacacaagtgtttcacattggagacatctgctaatataaatgggaggttttactgtcaagtccaattagcaaaacgtggtaataatttttttgtcagtattttcagattacatgataaaattttacatttgagcttctagcattgattaatataggatattgaccacgtttatgtttaaatttcattttgttcagcagacaaaatgtacttcccttaactttcattaatagtgtttacatcttttgtcagcacagcaaacttttagaaagtaatagttttacttatttttatcttctgttttctctttgtactgctttgtcttgcattgtgttccaacacatgagacttactgctcactgaattttggagtcttttagaggtaaattgtggactcaggattttttgaaacttggtgtgtaactctaaatcttgtatatgcatctttgttgcttattacatatttacacacacaaccacaaattttaaacttatgatgaaaatttacaataacctgaaagatccagagatgtatgagagcattttgtaacttgttattcagttactaaatttgaggtgaataattaaaaagaaaaggacattaggagagtgaaaatcttctcttcaaataatctttgatagataaaaatggaaggtaagatgtttctagatagaatgttttcatacaatttcagcttcatatcataaatttttctggaaagctatttcagacatagatttcatagtatttttctgagaatcctgtgaaggaacgctgtctctttgcaaagtaaggaggactaagggaaaatgatggtaccatgtaacagaatgagagctaattccaaattagcaacttcatcctgctttctattttacattgagtaaagttttaaaaagacaacagtcaagttgattttgattagaagataaaagtacataatgaaaatccatggccttatttggaatatatatcactttccaaattttattatttatttgagagttaataagttaatgttattaagcagttaataatttatatgtatggatataatataaaatgaattcatataattaaaaagaatttggttaataagaatttggagaatggaaaatacatttttaggttccttaatttggctgttggtacctgtgtatttggaatattttaggggattcgaattttttttaacccacattacagctaccttctagctttagtatggtagtgcttcattcaacttttgctgtcaggtttttattttcacctttttctgtgccaccaattcaaaagttataggattaggaaatataaatttatatttggtgattggcagcctctgaaatgttagattaatttgatctagttctaaagtgctttagtcatatatgaatttaaacctagtaccatccaaaaccatgtaatggattttaagaatctgttaggccttcttagcctttatacatgtccctacctgatttttactgtccttcatgatcctgttcttgaaaacttcagtttgtatttgagaatcctttaaatctccttccaatttgttttctccctgaagtaatataaaaggaagtatttaagtgaaagtttaagagttttaaaacattctttaaaattaatacagatagttagctatttatcttttaaaaataaactaaggtaaaaaacgtgacactttacatatttcatatttttcatatagtctggaggtatacacagttgttttgtttttaaccacggtattgaaacctttaaaaggtaattaagcatttggtcaagtaaatatagaacatttgtataaagaaagaaatgaaattgtgcttaatgttatatactgttattatttgcaggctggttttaattcttaatttgattagcaaagctaaaaaagtggatgttgaagttgaaagttttaaagaggtacaaaatcttacaaggacataaattattatttggttgaaaaatagcctattagatattgtatgtcccttcctctgtacaaattgtaaaatacttaaaataactatgaagaattcatataggaagtgtgatactattgtaaatgtgtatttgagaatatgcaaaaataaaaataatattttactgttaataaatgtttacttgtatatgaaaaaaaaaaaaaaaaaaaa

SEQ ID NO: 1183 - DNA, 4937 bp, Homo sapiens
acaggtcagagttgactccctgaaaagtgcagccggtttgaaatgcaagatggcggcggcgtggcgctgagaggcgcggcggcccctgcaggagaagacagactgctgctttggacctgttggtaatgatggcctgagctaaacatctaactagaagggatacccttccatttcaaagaacagaatgctaaggaagctgtggcaagtgattggagttgtgcttcaaaaatttcagaaattcagcagtattttatctgccaacaataagctctttacttgattgcaccatgagaaagctgctaatgagacttgttgagcacaaaaatggacttgaagaaccaaaagccattgttttcaaatgaagaacactgaacagttttaagcctcgatgctttttaatcaccactgagcttttcctcataacatcagaatggcaagcaggcgaaaatcaacaacaccttgcatggtccttgccagtgaacaagatccagaccttgagttgatatcagatttggatgaaggtcctcctgtgcttacacctgtagaaaacaccagagcagagagtatctcaagtgatgaagaggttcatgaatctgtggattcagacaatcagcaaaataaaaaagttgaaggtggatatgaatgtaaatattgtacttttcaaactccagatctaaatatgtttacttttcatgtggattcggaacatcccaatgtagtgctaaattcatcctatgtttgtgtcgaatgcaattttcttaccaaaaggtatgatgcactttctgagcataatctgaaatatcacccaggagaagagaattttaagttgactatggtgaaacgtaataaccagacaatctttgaacaaacaataaatgatctgacttttgatggtagttttgttaaagaggagaatgcagagcaagcagaatctacagaagtttcttcttcgggaatatctatcagtaaaactcctatcatgaaaatgatgaaaaataaagtggaaaataaacggattgcagttcatcataactcagttgaggacgttcctgaagagaaagagaatgaaatcaaaccagaccgtgaagaaattgtagaaaatccaagttcttcagcttctgaatctaatacaagtacttccattgtaaacagaatacatccaagtactgccagcacggtagtgacaccagcagcagttcttcctggattggcacaggtgataactgctgtatctgctcagcagaattctaatttgattcccaaagtcttaatccctgttaatagcattcccacctacaatgctgcattggataacaatccccttttacttaacacctacaacaagttcccttacccaacaatgtcagaaattacagttctttctgctcaagcaaaatatacagaggaacagatcaagatatggttttcagcccaacgtttaaaacatggtgttagttggactcccgaggaagtagaggaggcaagaaggaaacaattcaatggaacagtgcatactgtacctcagaccataactgttattcctacacacatttccacagggagtaatggtttaccatctattttacagacatgccaaatagttggtcagcctggtctggtccttactcaagtggctggaacaaacaccttgccagttacagcacctatagccttgacagtggcaggcgttccaagtcaaaataatatacagaaaagtcaggtacctgctgctcagcctactgcagaaacaaagccagcaacagcagcagttccaacttctcaaagtgtcaaacatgaaactgcattggtaaaccctgattcatttggcattcgggcaaaaaagacaaaagagcaactggcagaattaaaagttagctaccttaaaaatcagtttccccatgattcagaaattatcagacttatgaaaataacaggcctgacgaaaggagagattaaaaaatggtttagtgacacaaggtacaaccagagaaattcaaagagtaatcagtgcttacatctcaacaatgattcctctaccaccattattatagactccagtgatgaaaccacggaatccccaactgttggtactgcacagcctaagcaatcctggaatccttttcctgactttactccccaaaagtttaaagagaaaactgcagagcagcttcgtgtccttcaggcaagttttctcaacagctctgtacttacagatgaagaattaaataggttaagggcacaaaccaaacttaccagaagagaaatcgatgcttggtttacagagaagaagaaatcaaaagctttaaaggaagagaaaatggaaatagatgaaagtaatgcaggtagttccaaagaagaagctggagaaacttctcctgcagatgaatctggtgcacctaagtcagggagtacaggcaagatatgtaaaaaaacacctgagcagctgcacatgcttaagagtgcatttgtccggacacagtggccatcaccagaagagtatgacaagttggccaaagaaagcgggcttgctagaacagacatagttagttggtttggggacacccgttatgcttggaagaatggaaacttgaaatggtactactactatcagagcgccaattcaagtagtatgaatggtctgtcttcccttaggaaaagagggagagggagacccaaaggacggggaagaggaagaccgcgtgggcggcctagaggaagcaaaagaattaacaactgggacaggggaccatcactcataaaatttaaaactggaactgcaatacttaaggattattacctgaagcacaagtttcttaatgagcaagaccttgatgaacttgttaacaaatcacatatgggctatgagcaggtcagagagtggtttgcagaaagacagagaagatcagaattaggtatagaattatttgaggaaaatgaggaggaagatgaagttattgatgaccaggaagaggatgaagaagaaacagatgatagtgacacttgggaacctccacgacatgtgaaacggaagctgtctaaatcagatgactgaaatctgcctaaaacgttgaaggagaatcaattcttcaactcaagatgtctgatttactgtgaatttgcccaatctttgatgacattgaaaacgttttggggcatacacactcaaaaagcaggatccaatacccaaaagaaatggaacttaatgttgtgccaaagttaaactactgcagttggtggaagttctgcaatgtaaatagaacactaattaaaaaacaacttgtaaaaatgcaatttaaattttaatacagtacatttttcttctaatatgatggagacattctgaatcttagactttctgagggggtttaatgaccactagagcttgtcctcatattcagtccagtttaatactgtatgtctagtaagatgggctatatattgcctctattctttgagatgtgattaagcttagaactttgaccaaaaattttacagtaaaaattgttagaaatgggtaaaaaaaaaaaaaaaaaaaaaaccctgatttattactatgtcttatttatcagaccctgcactaagattaaaagttgtgcatgggcttatacaatttcaaatgtaaaaacagcctatttatatatgttgaaacaataagattttatggtttcactggcccttaataattggatccttcattaaacacatccatgaataccactgtttctactgttacttgttccattagaagctgatttgctttttattaaactgcaggaaattaattctgaagaaggaaaagaaactgacatggtaatttggatagggtgaagctttgaaataaatactgcaccaaaaatgtgaaaaagaatcacgtagtaaatgtatacttagtgttttcttacaatcgtggaaatcagaaatgtttatacaggtgtcagatcagaatttttaagagttatctttcagtgaaattttataacagtttcagtgaatagagaaaaaattctgaactgatcataatgagttaaaagttagcttttcacttatgaatcatgggagtgttaactgttaactcttgccgtatcaggagactgaaagttcatactaatttacaaactttgtaaagactggtgctgttcattcatattgggaagaaccctttcttttgtgaccataggaccatttttcaaaatgcgctttcttcgtagaagaaatgttcagtttaattagctttggattttaacatgtttttctgaatgaccagatgtaggcttagccagtttattttctctaatttaatggataataaatattaagctcttggttaaatgtttttcagccattgaaaatgttatgaaaaagccttgaatatgcatgctgctttcatttttataaactttttattttttaactatagctttattagtaattccaaaatgctgcaatgtagctgatttcctcactcagacagctggctttgtgggtggcttttttcatactactgttaacttttttaaaaaagaagcaatgtaaagaccgtaatgcactaagctttttttttttcttttacacgtttaaaaacttcttaaagcactctgtaatataatgattaaattgctcccttttataaacattgctaatgtggtctgagttttgtttgacaataattttaatgttctcaaaatttgaaatgtcaagtattagaaatgaagcctttgaatatagttgtttcccttgcaatatgttaactctgtgtagctgtatataactattaatttccctcatctcttttataggcctgataaaactcttctctgacgtttgctagcttttaaatatatttatttgacagagcaaaagaaccctcttctggttgattgtgaccttgaatacaaaataaaagtagtgattagtagtttaaaaaaaaaaaaaaaaaa

SEQ ID NO: 1184 - DNA, 4373 bp, Homo sapiens
ttttggcgtagattccccactgatcgaggcattttttttccctttttttttcctttttttttttcttttaaaaattttggccatcgttctccgtacgggggctttttctgtctgtctgtctggctggcaggctggctttccccctctttcccacggagcccgagccgggcgcccggtggggagtggggagtgggtggggggagccagcagagttccattttggaacgcccgtgccgcgtctccgcgttcccagcccgggtccccgcgttcacagccccagcgcaggtctggatgtaccgactgcttttggaataaaaagattcccaggatgtgagcaacacgggaccgatatgatgcttcctggtgtgtttagtggttggtgccattccaattttctgtgctgaaatcattctgaaaactcaaacagtagacttcagcacacaaggaaagccaaagccatttgagggggaataaagccaaaagcctttcaccttattcgttccaagaatctcaccgccccctccttatccccctccaaaaataagccattgcacacagacaggcagcatggctagcaaacgaaaatctacaactccatgcatggttcggacatcacaagtagtagaacaagatgtgcccgaggaagtagacagggccaaagagaaaggaatcggcacaccacagcctgacgtggccaaggacagttgggcagcagaacttgaaaactcttccaaagaaaacgaagtgatagaggtgaaatctatgggggaaagccagtccaaaaaactccaaggtggttatgagtgcaaatactgcccctactccacgcaaaacctgaacgagttcacggagcatgtcgacatgcagcatcccaacgtgattctcaaccccctctacgtgtgtgcagaatgtaacttcacaaccaaaaagtacgactccctatccgaccacaactccaagttccatcccggggaggccaacttcaagctgaagttaattaaacgcaataatcaaactgtcttggaacagtccatcgaaaccaccaaccatgtcgtgtccatcaccaccagtggccctggaactggtgacagtgattctgggatctcggtgagtaaaacccccatcatgaagcctggaaaaccaaaagcggatgccaagaaggtgcccaagaagcccgaggagatcacccccgagaaccacgtggaagggaccgcccgcctggtgacagacacagctgagatcctctcgagactcggcggggtggagctcctccaagacacattaggacacgtcatgccttctgtacagctgccaccaaatatcaaccttgtgcccaaggtccctgtcccactaaatactaccaaatacaactctgccctggatacaaatgccacgatgatcaactctttcaacaagtttccttacccgacccaggctgagttgtcctggctgacagctgcctccaaacacccagaggagcacatcagaatctggtttgccacccagcgcttaaagcatggcatcagctggtccccagaagaggtggaggaggcccggaagaagatgttcaacggcaccatccagtcagtacccccgaccatcactgtgctgcccgcccagttggcccccacaaaggtgacgcagcccatcctccagacggctctaccgtgccagatcctcggccagactagcctggtgctgactcaggtgaccagcgggtcaacaaccgtctcttgctcccccatcacacttgccgtggcaggagtcaccaaccatggccagaagagacccttggtgactccccaagctgcccccgaacccaagcgtccacacatcgctcaggtgccagagcccccacccaaggtggccaaccccccgctcacaccagccagtgaccgcaagaagacaaaggagcagatagcacatctcaaggccagctttctccagagccagttccctgacgatgccgaggtttaccggctcatcgaggtgactggccttgccaggagcgagatcaagaagtggttcagtgaccaccgatatcggtgtcaaaggggcatcgtccacatcaccagcgaatcccttgccaaagaccagttggccatcgcggcctcccgacacggtcgcacgtatcatgcgtacccagactttgccccccagaagttcaaagagaaaacacagggtcaggttaaaatcttggaagacagctttttgaaaagttcttttcctacccaagcagaactggatcggctaagggtggagaccaagctgagcaggagagagatcgactcctggttctcggagaggcggaagcttcgagacagcatggaacaagctgtcttggattccatggggtctggcaaaaaaggccaagatgtgggagcccccaatggtgctctgtctcgactcgaccagctctccggtgcccagttaacaagttctctgcccagcccttcgccagcaattgcaaaaagtcaagaacaggttcatctcctgaggagcacgtttgcaagaacccagtggcctactccccaggagtacgaccagttagcggccaagactggcctggtccgaactgagattgtgcgttggttcaaggagaacagatgcttgctgaaaacgggaaccgtgaagtggatggagcagtaccagcaccagcccatggcagatgatcacggctacgatgccgtagcaaggaaagcaacaaaacccatggccgagagcccaaagaacgggggtgatgtggttccacaatattacaaggaccccaaaaagctctgcgaagaggacttggagaagttggtgaccagggtaaaagtaggcagcgagccagcaaaagactgtttgccagcaaagccctcagaggccacctcagaccggtcagagggcagcagccgggacggccagggtagcgacgagaacgaggagtcgagcgttgtggattacgtggaggtgacggtcggggaggaggatgcgatctcagatagatcagatagctggagtcaggctgcggcagaaggtgtgtcggaactggctgaatcagactccgactgcgtccctgcagaggctggccaggcctagacagggaagtctgttagaactgctgtgctgatcaacgggacgctccgtctttgaagaaagaagagatggtctctccccagccatgggccacccttgccagtgactccaagtggaactacttagctcgcgtgtgcctggagggtgcgggaagtccagcgactctcagacgcacctcccagaggaccggtgggaattgttcatagtgccaaagtcctactactgcgttttcaatgggtccttgtacatagtttgctcctctgccctagccctcacctcttgctatactggaaccgatttgtacaatgtgggaattttgttacctttttaatcaagggcaacttccttttccagcactaccattgtaaggtttttttcaggagggagggctaaccaccttgcttttctcttttctctttttcttttttttatttttgttttattaatttggggaaaggggtgttagcattagtgccatgatatctactggattttaagtagggagactttatttttaaaggtaggttgaaatttgggagatttctcggcaggaagggctgaaatccaggcccctgtctcaacttggagagaggtgacagacggcagatcttccaaatcaaattcctttccagttcttcccctggctgcctttttgggggtccctgccttagccccacacaaggctttctgaactgccaagaggggatctggcttctcaactgctcggcctcttgggccaggctgtgcccagccagccctgggagaactgggtagcaggtggctgacttctttaagcacctttctaaataccagcagaagaggctcccgcctctgttagcatgatcagtactattgtgacattaaaacaacaacaataagatcttcctatctggagggtacagaggtgaatggctttggttttcatttctcttcttcactgccttttctcggtgtggtatttgacaagattttagctcaaagcctcaccatgaattgattttttttgtttgtgtgtgtgtttgttttgggacaattttagatacctgagtgcactttttcagttagtcctaacttttaaaagaaggaaaaccaagagacatatctggtgtacgtgttgcagtatgaactctggttgcaatccctccccgtcccacactgccccccatttgagtacaccgcacaagtcaaacgctaggaagtttgaataaaaccaatttttctaacttgttgctcatttgttgtaactcaataaagcaaagactaaacatttttataacctttaaaaaaaaaaaaaa

SEQ ID NO: 1185 - DNA, 5231 bp, Homo sapiens
ctatcagtctcgcgctcaccgcccggctgaggaggtgaaagtttctccccaggaagataaaccgcaaaagacaatattgtgcatgatttgcgccttttctttggctttttctttctttcttcacccccccacccacttttttttttttttttttcaaaaagcagagagggaaaaacggagagtgaaggagcgaggaggcgagcgtgagagaaaggagagagagagaaaagaaagggcgaggggctagtggagaagtaaggaggggcgcgctgcgcgaggcggagagagggcgaagcagtcgcggcactggcgctcacattcctctatgctacaaatccaggaggaagtttttttttagggggctgagatgctccatgcctttccccgggcagccttgacgcgcggccctctcggcagagactgagcggcgagaaagtgcgagccgggccggcagaatctgcctggcgggcgctggagcctgcgttactcgcggcccgcagccgtccggctactttgcgtttggcccggccagcgcccgggcgcgccgcgccattgcctgcaggctaggacttcgcgaggtgggtcgactccccctccctcctcctcttcttcctcctcttcctcctcctcttgttcctcctcctcctcccgattttccctcctcggctggcgagggtggggggggcgggggaggccggggctcgccccgagcagccacgatgctcctggacgccggcccccagtacccagcgatcggcgtgaccacctttggcgcgtcccgccaccactccgcgggcgacgtggccgaacgagacgtgggcctgggcatcaacccgttcgccgacggcatgggcgccttcaagctcaaccccagttcgcacgagctggcttcggccggccagacggccttcacgtcgcaggcgccaggctacgcggctgctgcggccctgggccatcaccatcacccgggccacgtcggctcctattccagcgcagccttcaactccacgcgggactttctgttccgcaaccggggttttggcgacgcggcggcggcagccagcgcacagcacagcctctttgctgcatcggccgggggcttcgggggcccacacggccacacggacgccgcgggccacctcctcttccccgggcttcacgagcaggctgccggccacgcgtcgcctaacgtggtcaacgggcagatgaggctcggcttctcgggggacatgtacccgcgaccggagcagtacggccaggtgaccagcccgcgttcggagcactatgctgcgccgcagctgcacggctacgggcccatgaacgtgaacatggccgcgcatcacggcgccggcgccttcttccgctacatgcgccaacccatcaagcaagagctcatctgcaagtggatcgagcccgagcagctggccaaccccaaaaagtcgtgcaacaaaactttcagcaccatgcacgagctagttacgcacgtcaccgtggagcacgtaggtggcccggagcagagtaatcacatctgcttctgggaggagtgtccgcgcgagggcaagcccttcaaagccaaatacaaactggttaaccacatccgcgtgcacacgggcgagaagccctttccctgccccttccctggctgtggcaaggtcttcgcgcgctccgagaatttaaagatccacaaaaggacgcacacaggggagaagcccttcaagtgcgagtttgagggctgtgaccggcgcttcgctaacagcagcgaccgcaagaagcacatgcacgtgcacacgagcgacaagccctatctttgcaagatgtgcgacaagtcctacacgcatcccagttcgctgcgcaaacacatgaaggtccacgaatcctcctcgcagggctcgcagccttcgccggccgccagctctggctacgaatcctccacgcctcccaccatcgtgtctccctccacagacaacccgaccacaagctccttatcgccctcctcctccgcagtccaccacacagccggccacagtgcgctctcttccaattttaacgaatggtacgtttaaaatcagaaacaaaacatcgaacaaaaccctatttaagagactgatcacacacgtatacacaacattactgaaagaaccctgcgaatcaaaacaacccccacacagaccccgcaatccttttttaaaaaatctgccaatagacccaggacgagtaagagaggaagcatcaaccttttaaaaatttcctttcgctttcattatttttctttttttggcaaaggcttggtacccaaggtgcggtagggggtcgagggggaggaggccacctgaccaaatgccgccaaccccgagggccagtttcttgtcgaattggtacgggctctctggggcttcggcttctttttttctttgttttcttgtaaatacagaattattagcttaaaactgtactgttgaattctgtaaatagttatatctcggttggagcgggtgggtgggattgtggcgttgtggtctttgcattgggggaggggggagggaccggatgggcggggggagggggagggggaggggtgggcggccgaaagccaactgtttgtactgaatggcaagaatgttctagtaaatgtgtaccaaaatgtgaattactttgtacgattacagtctccacgtcgacctaacccaatattattggtattaatgtgctttttttgtataaagtgcaaacatttcgtcccaaagtctaagtactttagtgcagtaaaatgttgtttcatgtcctgtcaagaattcgtatagtacgagcctggatctgcgtgtcaaactgttccatttgtttatgtaaagtgatattaaaaaagatataaactataactgtccgttacttttggcaaaagatacaaccacataatgtatataattcctagtttccatatttatccgcatgtaaagggccggtttatccatgttacagctcttcaatatttatggctagaagaactcgtatgtacactttagtttccagaactgtttggtaacctttcgtaccttattaaagattcttaaatctccgtgattgtggtaggaatttcttcttcacccaccagcaacctgctgcctcttctgccagtcttaaagggtctccagaaaagctctccagtctcccttgccttccctttctgtcactgcaggtcgtataaacgtgataaatgaatgctaccctgctggctctccgagagagtgtaattagtatttatatcaaaatttatgaaacaaattttcggccgcagtataatttaaatgacctttgcagatgtagaataacaaccataaaaataacaggaatagattgcacaggcgacatcaatattaatgtagacgaattgtcagaagctcaggggctcgctctgcaacattgcaaatgaacttgcagccgagggttccgctgccccctagattaaattccccgggctgaaactgagttgcagatttacaatatcatattttaaattgctgtcttcaattaaaccatttatgaccataactaattttcaggatgtcgatgcatgcttttccaggccttccttctttgtacaaaagtaaatgtccataaagcgtttcacttatattcttcaaacatgatgctaatttaaattaattacttcctatgatatgttattattcctatgattttgccactgttattagttctctcaaaaatacatctagggaagaggattattttaagtaatttgattatctttctatctcttttatttatttctcatttacttaagaaattcgttccattggttggcattgatacagtaaatttgtaaatgaggagacaatataaaaaatctaaattacttgtgcttaatgactgtagcagaatgccttttctctaaatcagattgtctttcttgcagtttagtttgatagatttgcaagctatgctgcttccatgaagttagctgcgctggtaggaacgcaggcttctttgtctctggttgtagcttgcatgatcgccccattaggcagacaacgtagccggagatcacaaatcaggcccttggctgtagttgctagtgtgtggaggtgcagagcaggtggcagaaactgacctcactgggcaagggtggccatggacctgattctttaatgcactctatgtgttcaggaagccacaggccatatttgactctgagaaagaaaacaagaggaaaaaccccacaaagtataacaaccccttaagatacatctattttaaagtgaaattaatttttcagtttataccattggccaattacaagataaaaatgttcaatttctttaagaatcctttgttgacttgtcttttcatctcttgctatttatatttgtcactgtttcaacaaagtcttatttgctgaggaaggactttgctgcacttactgtaccacatcaaacactggggagggtggtgtttaactttttaaaaaatgttattctgattataacaataatattggcttttttcatgaaaagagcgccaccttgcaaggtttagtgagatttatggaagttgaatacctaagcaggaattgctgctagctccaaaaatttgcgaagcaaaagctagccccaattggtttggaagtttgaaactgattaacagatttgcatttgaagtgactccagacattaggtccagacattagttaaaaatagaaagaggaataaagacatctcttctctctagaaaagataacaccacaattaataatccttcccactttcattgagatcagcttgtctgataacctgatatgagtgtgataatgataaacatgataatagtggtacttttgtaattttgctggtgcatttaagaagatagtaaatgatgagttcatcttttcttcgaacattcctattcctagatgtagtttacctcaaattgggaattataactgtctaatttttgttgtgtacctgatgccccttttgctttaataccacagtgtaacaattaaatatcacactatgacatatgatttaagtaggatattttaaagataaattttaggggtaaatgtttacttcaaaatgactccatatttcaaatatctgtttagactgtgaaggccaaataatttttaagaaaacatttgaagagtagtgtgtttgcatttgtgaataatcttactcacagcaagtaaacgtaataaaagccaacatttaagccaa

SEQ ID NO: 1186 - DNA, 2698 bp, Homo sapiens
atgctcctggacgcgggtccgcagttcccggccatcggggtgggcagcttcgcgcgccaccatcaccactccgccgcggcggcggcggcggctgccgccgagatgcaggaccgtgaactgagcctggcggcggcgcagaacggcttcgttgactccgccgccgcgcacatgggagccttcaagctcaacccgggcgcgcacgagctgtccccgggccagagctcggcgttcacgtcgcagggccccggcgcctaccccggctccgctgcggctgccgctgcggccgcagcgctcgggccccacgccgcgcacgttggctcctactctgggccgcccttcaactccacccgggacttcctgttccgcagccgcggcttcggggactcggcgccgggcggcgggcagcacgggctgttcgggccgggcgcgggcggcctgcaccacgcgcactcggacgcgcagggccacctcctcttcccgggcctgccagagcagcacgggccgcacggctcgcagaatgtgctcaacgggcagatgcgcctcgggctgcccggcgaggtgttcgggcgctcggagcaataccgccaggtggccagcccgcggaccgacccctactcggcggcgcaactccacaaccagtacggccccatgaatatgaacatgggtatgaacatggcagcagccgcggcccaccaccaccaccaccaccaccaccaccccggtgcctttttccgctatatgcggcagcagtgcatcaagcaggagctaatctgcaagtggatcgaccccgagcaactgagcaatcccaagaagagctgcaacaaaactttcagcaccatgcacgagctggtgacacacgtctcggtggagcacgtcggcggcccggagcagagcaaccacgtctgcttctgggaggagtgtccgcgcgagggcaagcccttcaaggccaaatacaaactggtcaaccacatccgcgtgcacacaggcgagaaacccttcccctgccccttcccgggctgtggcaaagtcttcgcgcgctccgagaacctcaagatccacaaaaggacccacacaggggagaagccgttccagtgtgagtttgagggctgcgaccggcgcttcgccaacagcagcgacaggaagaagcacatgcacgtccacacctccgataagccctatctctgcaagatgtgcgacaagtcctacacgcaccccagctcgctgcggaagcacatgaaggtccatgagtcctccccgcagggctctgaatcctccccggccgccagctccggctatgagtcgtccacgcccccggggctggtgtcccccagcgccgagccccagagcagctccaacctgtccccagcggcggcggcagcggcggcggcggctgcggcggcggcggccgcggtgtccgcggtgcaccggggcggaggctcgggcagtggcggcgcgggaggcggctcaggcggcggcagcggcagtggcgggggcggcggcggggcgggcggcgggggcggcggcagctctggcgggggcagcgggacagccgggggtcacagcggcctctcctccaacttcaatgaatggtacgtgtgacgggtcggggcctctctccctctccctgtccccaccccagcgcagcagccctccccgcagctagcagcgagggcaccttgtgatcatgttgttaaaattatgaatctgatttttatgatgatgaaaattttaccagcagaaggattttttaaagttttttttttttttttaataataatctaggcatgaagagcaaaaatatcccttccggagtctttgaagctgaaaatataaaacaaataaaaaataaaaaaataaaaacccacaaaaatgttgaaccaaacctccctgctaatctccatgcccacgttctttcccaccctgttcccagtcttctgacaaactgtgtacatagcggactcctcctttctcctccgaggtggttttaaaggctttttggtgtatagaagtttgtccatttgtaaaactccggattgcgttcctccccgccttccgccccttcccttccctaaagtgatgggctttctcttttctctttttagtttacccggtttctttttaagtaatgtggaagaaaatggtttattttgtattgtggtattgaatattgtgttcctttttatgaggcaacctgattgtaaacttcatgtaactatagactggaaaaaatgagccgtgccaaagtctcccttctgtttcttcagcacattgacccatagcacacacatacacaccaccaccaacaacgcttgtgaatgtatttttctgttagctgggtttacatgtgatgttttagtgcttttgcaagttcaatttgttagttcctgtatgaaagattgtgggggaaaaataaacgtcgtgccgttagctttttccgtaataacacccttccttctgtaaatacccgttaccatatttatccatttgtaattaaattatggtattaacttgctacagaggaaacaatatttataaagaatgtttcttaactataaatatgtacaattgtgggcataaactgtttcagattttttatttgaaggttttaagtggtttgatcatttcttgtgatgttttgagagtaatgcatacagaaatataataaaatgtgttgaaactgcaaaaaaaaaaaaaaaaa

SEQ ID NO: 1187 - DNA, 3939 bp, Homo sapiens
gcggcgagtaacgagcctgcctactgcccgctgcccgcctgcccggccgctagccggctccgccacttggcgcagcccagcccggaggccggtacccagggagcctcctggccccgcggttctgtgcactcggggagaggaggggtgcccgggacaggattggcaaactccgccctccacttactattttgcttatttttctttgtgcgcgcctgttagtttgttaaaccagatctagtccgagtcttttctcctcccttctcctccctcctcctccccccgccaacaccccctccctgctctttcttcccctcctccctcctatccctctgcaggagactcttgcagtgacggaaagttgcagcccctggtagcgccttgggggtctccccgcagtgtccaaccgccgccacccctttccgactacggcacttcggagatctcctccttcgccggtaccctctctcacttcggccggatcgcctgtgcccagaacgtcccacccatgacgatgctcctggacggaggcccgcagttccctgggctgggagtgggcagcttcggcgcgccgcgccaccacgagatgcccaaccgtgagccggcaggcatggggctgaatcccttcggggactcaacccacgccgccgccgccgccgccgccgccgctgccttcaagctgagccctgccgcggcgcacgatctatcttcaggccagagctcggctttcacgccgcagggttcgggctacgccaacgccctgggccaccatcaccaccaccatcaccatcatcaccacaccagccaggtgcccagctacggtggcgctgcctctgccgccttcaactcaacgcgcgagtttctgttccgccagcgcagctccgggctcagtgaggcggcctcgggtggcgggcagcacgggctcttcgccggctcggcgagcagcctgcatgctccagctggcatccccgagccccctagctacttgctgtttcccgggctgcatgagcagggcgctgggcacccgtcgcccacagggcacgtggacaacaaccaggtccacctggggctgcgtggggagctgttcggccgtgctgacccataccgcccagtggccagcccgcgcacggacccctacgcggccggcgctcagtttcctaactacagccccatgaacatgaacatgggagtgaacgtggcggcccaccacgggcccggcgccttcttccgttatatgcggcagcctatcaagcaggagctgtcgtgcaagtggatcgacgaggctcagctgagccggcccaagaagagctgcgaccggaccttcagcaccatgcatgagctggtgacacatgtcaccatggagcatgtggggggcccggagcagaacaaccacgtctgctactgggaggagtgcccccgggagggcaagtctttcaaggcgaagtacaaactggtcaaccacatccgagtgcacacgggcgagaagcccttcccatgccccttcccgggctgcgggaagatctttgcccgttctgagaacctcaagatccacaagaggacccacacaggtgagaaacctttcaaatgtgaatttgaaggctgtgacagacgctttgccaacagcagcgaccgtaagaagcacatgcatgtgcatacctcggacaagccctatatctgcaaagtgtgcgacaagtcctacacgcacccgagctccctgcgcaaacacatgaaggttcatgaatctcaagggtcagattcctcccctgctgccagttcaggctatgaatcttccactccacccgctatagcttctgcaaacagtaaagataccactaaaaccccttctgcagttcaaactagcaccagccacaaccctggacttcctcctaattttaacgaatggtacgtctgaggacaaacacaaaccctgttaattatagaatggaccaaatacatttttaaaagaaaactgagaccaatcagatggaaatggagttttaaggcaagaggccatatatagggctacatcttgttaattgcaattgtccaggaaggttttgggcaagatccaaaagtagccatgcccttttctcaggatagaaaatatgttttggcatttgaagcattttttacaaaatctttacactactttttcttccccttcctcttgctctctgcacaccccattcttaaactcctccaattcattttaacacttgtcctgtttcttgagaggaagttatagaaggcttgttggtggtggtgatgttaaactgatggaaattctttttcgccttagtggtgattgtttaaactctcacagtcttaaaccgtgccaaagtcctgttatgtcttgaacttttcctcaaagcattacacttgtgaatgtatttttgtctaatagggtcgaaactgttgttcagtattttttcaggctgaggatgtgatgttactctacacattgtgacgtttagtatacagttgccttttgtaataactttttttttgtaaatacatatccattgatgccatatttatcgtttgtaatttaattattgctacaagtgccgggaactgaacaatatttatggataaatgttttctaacaaattctgtacagcttttgattataactgctttagcattaaaaattgttttgaaagaagaacacaatttacaattttggaaccactgactcctttctcttgttttgtaacagccttcttctacaaagaggagatgtgagcaaattaaatcttgtttgttggtatttataactcactcagatcccttttttaattgttaaattatttttctattacagtataaattccttacagtgtcagtttccatctgggaagactctcctttctttatctctatctcagatggttgtttaactgcgagtttaaatgtgtttgtcctggattttcggcatgcaaatcaaatattactgatcaattcagttagtggccatgacatctcaatcttgtacttcaaagactgagaagctggatttaatcatccctgccctacatatataaacataaggtaacctactgaattttatgtcccttagttctttattaccttacataaaaatgaaaattgcggcaggatgcatgtctgtctgttctatctagagatcacccatatacctatatatgtttgtatctatgacttatctaatctgcctatcaatctatctagtagctatctatatattttcaaaagatagcttatgtctaaaacagtggtgatgagtaaggccagttgagcattgcttacttatggttaaagtgcttcttaaaagaaccatagtccatttacaattttggaaggcaaaggctgatttgtttgctgtatatagttcaattcataattatcgcaattatccataacatttatatagcggtgtaataactgcagcagttctgaaatgatgctatgggaaaaaaattgcaaaatatgtatttttaaagttcatgatttgtaggcaaagatgttaagagcattgtttccattaaaatcaataacaatgaaaaacggttgtttgctttgtgataaaatgttaacaatccatttaatcttcagtgaagcaactcatttggacaaacagttcttttacagtggttatatggaaaagaaattgattgctattttggggggctggagtgggtagagtattgagaccttttttattagggtgctgtttgttattgagagcccaatctctgcatgaataacagaaaggtggacataaggaattgtaaagtatttagaatgtattgaataggcttaagtacctcctttaaggggcaatgctctaggtttttggtggcagtcaatttggtattatatatgatcattttcaattctagaattttgtttattgttctttttgaagaaataaagtcttggcacatcttatttatgttataa

SEQ ID NO: 1188 - DNA, 4089 bp, Homo sapiens
gcaggaaacgcgaacggctccagttcaaagccacatgcaccaacgtgacatataagccattaaaatatcatcctgacggctcatttctgcttcatcatacattccctaactgcttcctgaaagctggaaaaggagaagtgaaggatgaccgcctcgctggaaccacaaaagagaggcttggaggggtttgtggtcccctctcagccaccccgaaatgatgtgcagaaatgaggcgatcctggcaacaggtggagtggggctcaaagtcagaaaatgagatacaagacatccttggtgatgaggaaacgattacggctttaccgaaacactcttaaagagtcaagtagcagctctggacaccatggcccccagctcaccgccgcctccagcccctcggtgttcccgggcctccacgaggagcctccccaggcctcccccagccgtcctttgaatggactcctgcgtctggggctccctggagacatgtacgcgcggccggagcccttcccgccagggcctgcggcccgcagcgacgccctggcagctgccgcagccctgcatggctacgggggcatgaacctgacggtgaacctcgctgcgccccacggtcctggcgctttcttccgctacatgcgccagcccatcaaacaggagctcatctgcaagtggctggcggccgacggcaccgcgaccccgagcctctgctccaaaactttcagcaccatgcacgagctggtcacgcacgtcaccgtggagcacgtcggcggcccggaacaggccaaccacatttgcttctgggaggagtgtccgcgccagggaaagcccttcaaagccaaatacaaacttgtaaatcacatccgcgtgcacacgggcgagaagcccttcccttgtcctttcccggggtgtgggaaggtctttgctagatcagaaaatctcaaaatacacaaacgaactcacacaggcgagaagcccttcagatgcgagttcgagggctgcgagcggcgcttcgccaacagcagcgaccgtaagaagcattcgcacgtgcacactagcgacaagccatacacgtgcaaggtgcggggctgcgacaagtgctacacgcaccccagctcgctgcgtaagcacatgaaggtgcacgggcgctcgccgccgcccagctctggctacgattcggctacaccgtctgccctcgtgtcgccctcgtcggactgcggccacaagtcccaggtggcctcctcggcggcggtggcggcgcgtaccgccgacttgagcgaatgatgtccaccgcgttgctcgcaaggtaatctcgctccgcgcagctgagcgccccgcatctcgcgcctgctacatcaaagggcccgcgcacaaagcagtgtttcttcgccacggtgcatcttcatggtaagttaggatttctatggcaatgtgcaagtcgcactgaaatcctgaaaggccaagcctggagcccgtccaggcttttcattaaggacataatatttacgtctaacagaccttttttcttgtgtatacaagtatatatttttgtttgacgcggactaaatcattttcatttaatttccggtaaacaaaacccacgcgaatgggcacttgtacccgatcataataaaaatggataataatgtgaaggaagaaaagagccgcttgaatcgccgctcagccccctttgtttctgctttctgcggtgatcagagggcgcgtttgggtttgatggcgagtttctaaaggcgaggaaatggtttgtaagaggggaaagaaaaggagaaaggtctaatcaagctcgggttgttcaaagagtcgggttttggggttgaaagtgtgagtttgacggtgcatcagcatgccgcgttaggctcgccatggaaatacgcgcggggagcggccgcttcaaaggcggcacacttcactacagacactctattaagatacatttgcgctgacctttgctttcacgccatttaatactgtcactgcgctctccagtatatacttcctttctagaacccgacttgcccacgtttaggggttcactctgcaccctgatgtgggaggctttggcgcaggggacactttcaggaaagggaggagcacaaggactctgtgcatcttgactgcaccccaaagaggctccaggatcaggagtgaaagattttaaagcagcctccgaagcttaacaaatgagcattccaagctcagttttgtgcaaatcgcctttctgactcttgagtaggatggaggcttaaatttaatggcgacttggggggaagggagccaccctgggggagtctgaggagttcagactgtgcccttgggaatttccactctggctttccgtgccactcttcttcctttccatcccaaaagtctcttgcggcccctgaaacttgtttctttctaaggcagggtgtgtggtacccttaggcctggactagtcctagatgcaaactcaagagcccaaggccaaggggatgtggggaagatggcaggaaagttagaagtccatgttcccttaattgtcttgttgtttattttatccaagtaccccagtgaataggggaaaaataaacacagtgaaaaaaaaaatcaaacagtggagtcttctttagtgccagtccttgtggttgaataaaaaggatggtccgctttctattgagctgagaaatctttgaagtgggagttattatctgagacattcctgcttgtcgtcctaacaacgctgatgaaacgtaaaaggttctttgtcagcgatttgttctcctctctgtcaaactccctctgccccgttagtttcaaaccgtttctaaagagataaaaatcaaacttcttttaaaacaatatccacacactgcatcaatacataactttaggtctaagtcttgctaagggataaacaaaagcaatgcctagacatcagggtcagggcctggtctggtgaagtatgcagaagttggggggccctcgggacaagctttgggacatgaggaaaagaatgcagagagggtgcaagcagaatacataccctaagtccataattgtgtttctgcttctttctgctctggtttgcattcaatcagcccaagttgggtcacatagatgggtttcctttgggtacccctcaggctcctaatattcttgcccaggatccttggaacttaagaatgcagccaagcaattgttaatatctcctgctccttcaaagccacctctgctaaaaatagacccattgtgtgtttcttctcactagcagcaatcaacaagccctttctgccgttaataagaaggagaatagctgaaggagagagatattttattaatttcctgtttccttcagaatcttggcaattgaagtttagaaggtttggtctacaacacagtgatcgaaaatgcatgtaaatgcccatccttcccttcattcacgtgtgaagttgttcattttatattgtgcccagcaaagaaactttcacccagttcaggtttccccaaaactcctgtggtggttttaaaggtggtttaaataaataaggatgtgctggtccccctactctgtgtgtgctgaataaatggcttgtaaagaagtttttccaagctgtaacccatgctgttattatagttgctgcaaaatgttcttcctgatattgattttatttgttaactgaaggtctccatatgtttgtttatattgctaatttatgagaaaatgtaataattgcaatgaatgtgaattatacagacaggcaaacattttgtaatcataattcacatatacacaaaagcctggctgaaatctttagactatttgtaccctctctacccacactgtttgtgatttatcatctgtctctttagtgtcagttaaattatgaactaacttgaaaataaaagttgtttgactgaaagtgattgttgaatgaacaacaaagttgaaagccatggcttgatcttgtaaatatataaatgtaaatgatattaaatctgtgattccttttccctccaaaggcttttgtgtacatggcgctgcatttggctattttctttggaaataaataatgtgatgtttctcttcctcttttg

SEQ ID NO: 1189 - DNA, 4607 bp, Homo sapiens
gcggccgcaagcacgggggcgaatccccgctgggtcgagggcctgaacgggagccaatcgagcagccgaggctactgccaatcacgcggctccctccaatcccacccgtgccatttccaaaatctcggtcccactgtgcagctcaaatgtggtgttcactctgccaatcgctggaggatagagtgggaacaggaataagcagagttaagaggccaggacaaaagaagttaaagagcgcccaatacatacatgtttttgaaggcgggcagagggaataaagtccccccagtgagggtctatgggcctgattgtgtagttctgatggagccccctttgagcaagaggaacccgccagcgctgagattagcggatttggcaacggctcaggtccagccgcttcagaatatgacaggcttcccggcgctggccggcccgcccgcccactcccaactccgggccgccgtcgcgcacctccgcctgcgggacctgggcgctgaccccggcgtggccaccactccgctcggacccgagcacatggcccaggcgagcacgctgggcctcagccctccctcccaggcgttcccggcacacccggaggctccggcagccgccgcccgtgctgcagccttggtcgcgcaccccggcgcgggcagctacccctgcggcgggggcagcagtggcgcgcagccctccgcgcccccgcccccagcccctcctcttcctcccaccccttcaccccctccccctcccccgcctcctcctcctcctgccctctcgggctacaccaccaccaacagtggcggcggcggcagcagcggcaaaggccacagcagggacttcgtcctccggagggacctttccgccacggcccccgcggcggccatgcacggggccccgctcggaggggagcagcggtccggcaccggctccccccagcacccggccccgcctccccactcggccggcatgttcatctccgccagcggcacctacgcgggcccggacggcagcggcggcccggcgctcttccccgcgctgcacgacacgccgggggccccaggcggccacccgcacccgctcaacggccagatgcgcctggggctggcggcggcagcggcagccgcggcggctgagctgtacggccgcgccgaaccgcccttcgcgccgcgctctggggacgcgcactacggggcggttgcggccgcagcggcggccgccctgcacggctacggagccgtgaacttaaacctgaacctggcggctgcggcggccgcagcagcggccgggcccgggccccacctgcagcaccacgcgccgcccccggcgccgccgccgccgccggcgcccgcgcagcacccgcaccagcaccacccccacctcccaggggcggctggggccttcctgcgctacatgcggcagccaatcaagcaggagctcatctgcaagtggatcgaccccgacgagctggccgggctgccgccgccgccgccgccgccgccgccgccgccgccaccgcccccggccggcggcgccaagccctgctccaaaactttcggcaccatgcacgagctggtgaatcacgtcacggtggagcacgtgggaggccccgagcagagcagccacgtctgcttctgggaggactgtccgcgcgagggcaagcccttcaaggccaaatacaagctcatcaaccacatccgcgtgcacaccggcgagaagccctttccctgccctttccccggctgcggcaaggtcttcgcgcgctccgagaacctcaagatccacaagcgtactcatacaggggaaaagcctttcaaatgtgaatttgatggctgtgacaggaagtttgccaatagcagtgatcggaagaaacattcccatgtccacaccagtgacaagccctactactgcaagattcgaggctgtgacaaatcctacactcacccaagctccctgaggaagcacatgaagattcactgcaagtccccgccaccttctccaggaccccttggttactcatcagtggggactccagtgggcgcccccttgtcccctgtgctggacccagccaggagtcactccagcactctgtcccctcaggtgaccaacctcaatgagtggtacgtttgccaggccagtggggcccccagccacctccacaccccttccagcaacggaaccacctctgagactgaagatgaggaaatttacgggaaccctgaagttgtgcggacgatacattagaatttattattaataataataagtgaaataataagtgggagtccttggaccacatcctaacctgagacaatgccgagcctgagacaaacccgtgactcagacttgccaccgggtctaattagccctatttattcagtatgaaaccctatggtgtttgtacatttaattaatttaattaagatatttgggcttttttttttttttttcttaaaaaacaaacaaaaaacaaccaagctggacttgtacattgcaggaggatggggctgggggcaaattgtaccaaggaaaatgaatggagagattagttaatggcgatacacactgccgatgcaatatatatatatatatatatatacatatatatatatattattttttttaaaagggggagaaaaagagcattaagtcagaacttaacacagcaccaaggccctctgcatttcccagagtgcctctcaaatgcctttgacaccataccatgggctgcttttgagcctccttgttggaccctaattctgccaaggcctcttgattgtaaaccacacacctgctgcattgccaacagatcctgttccgtacctgtgtccaaaaacatttgtaaaaaccctttgagtttaatatttgtaatttttaatttccactcttttattactgatcttagcttaatacaatatttttatacaggattatttcttcagtatcctactgtgtgattttaaaaaaagatgcagcaaccttaatatatctccatatcttgtgctactgtgattgttcaagcaaaagtggagagaagaaaagctgctgcaaaagacaactgtgaaactgtgatattttataaaatagaagaaattcaagtgctttctttttcctatatgtttttttttttttatctgaattctcagatactgcctcctaactgtgtccaaacttcttgtgtaataaagagattctgttttcgatcctaagttctttgggatgccaacattcacagtcaagtcttgaggaggtgtgatgatggcatcatgcctatttttttggaaagctgttgtttttaaaacaggccaacacctcttttatactgttgtatcagccttttaaaaagtctatttttcaatgcctgaaactgcattttaatgcattttcttccacctgagcactgagcacaccaaactggaatccatttgaaaatgacagtgtgtgaagtgtatgatttacattaaaagaggggagggagttgccatacatattaaaaatttttaaaaggtttatagttaccaccaaacactgatgaatgtgtgacctttgccagagctgtcaagctaggataaaaaaggtcaaggacctaggacaataactcttagtcgatttattttcggttggtacaacacatctcctgtgcaaaatgtagtccatcagaaacatcctacagatacactaaagagcactaatttatccttagagaccccgaagacaccccctccccagggtttgtagaaatttgttttgtgtgctgtgagtggttgatgtagtcttgtcattgttaataacttgtatgtgaacactattatttgtacagttgaattaatttattttcagacatcatcctttttttttttctttcctggaagagttcaaagcacaccaaagaattatattatacattttggtgaaagattgtcatttatgatccatggtttatttaaaaaaaaaaggaaagaaaatggaaaaatatatttttaagcttacttgaatgaacaacgtaatgtgaaaaccaagactcttcctgcatgtcttttttgcattgtgttgataagattatatatagtttatagatatattatattactagtacagtgcatggtgctgtcacttggaaagcctttcaatgttgtcttcagattgttgtgatgaatatgaaacatgcagaccctcctttataaagaaaaagaccttaaaacttgaatatgagataattttacattttaaaagtttatttgattttcatattattcactttcaaagccctttcaaatagaaaaggtatgaacttttggggggataatttatgtatcgtaaacttattagaacaaaatattcctgatgtataatgagttgttttatttatacaactttttcaatggtagtttgcactattctttattatgctacaggtttatttattatgaaacaaaggaatatgtattttatgtattttaccatgcataggttaactctttgccacagatttattggttcttgatacacctaaaataaaaaaaaatgtgtacctccaatagagagcaagcaagaatgattatgaagtaacaaatttaataaaggtattcttgttattattaaaaaaaaaa

SEQ ID NO: 1190 - DNA, 4128 bp, Homo sapiens
gtgttttcctccaggctaagtccatcttccggcttgggcagacgctgccgcggaatccttgactctagttttctgagtcgattgtgatcatggctgctgagtctgatgttctgcatttccagtttgaacagcaaggagatgtggtcttgcagaaaatgaatcttttgagacagcagaatttattttgtgatgtatcaatttacattaatgacactgagttccaggggcacaaggtgattttggctgcttgctccacttttatgagagatcagtttttactcacacagtcaaaacatgtcagaatcaccatcttacagagtgcagaagttggcagaaaattgttactgtcttgctatactggagcacttgaagttaaaaggaaagagcttttgaaatacttgactgctgccagttaccttcagatggttcacattgtggaaaagtgcacagaagctttgtcaaagtatctggaaattgatctttctatgaaaaacaacaaccaacacactgacctgtgtcagtcttctgatcctgatgttaagaatgaagatgaaaattctgataaagactgtgagataattgaaatttcagaagatagtcctgtaaacatagatttccatgttaaagaagaggaaagcaatgctttgcagtctacagtagagagtctgacatcagagagaaaggaaatgaagtcaccagagctgtctacagtagacataggttttaaagacaatgaaatttgtatccttcatgtagaatccatcagtacagctggtgtcgaaaatgggcagttttcacagccttgtacctcttcaaaagcaagcatgtatttctctgaaacacagcattcattgatcaattctacagttgagagcagagtggctgaagttcctgggaatcaagatcagggcttattttgtgagaatactgaaggaagttatggtacagtgagtgagattcagaatctggaggaaggttattcactgaggcaccagtgccccaggtgtcctcgaggctttcttcatgttgaaaactatctgcgccaccttaaaatgcataaactattcttatgcttacagtgcggaaaaacatttacacagaagaaaaatctcaaccgacacatccgaggacacatgggcatacggccctttcagtgtactgtgtgcttgaagacatttactgccaaaagcacacttcaggaccacttgaacatacacagtggggatcggccatacaaatgccactgttgtgatatggatttcaagcacaagtctgctctcaaaaagcacttaacctctgtccatggcagaagcagtggtgaaaaactatctaggcctgatctcaaaaggcaaagtctactataattataatcacagacttgttatataacgtttgtattattctattacgcaagtctttctgtagagatgcagcatttgtaatatttcatccccccaatctttgtttcttatattttgtcggcttacacataatcattctttctgaacttctaacagttccaaagttatgggaggcacagtaaagctgatgggattctgtctcatctcataccttacatataagtctcagtagtatccctagagaaatagtgttcctctcttatatattcttgattctagtgacaaaggatccagcagtatttgcagattccgatttggagtctctaggtaattgatttaagtataaaatccaatcatataaaaactttaatgaattaggataacaagaagagaaaataaaggtaaaaacactattacctgtttctagtcactttagaacagatggcactaaaaaaatttttttttaactttttaccagctgttcttggattccaaactaaacaccaagatacttttcattttaaaatgtataaagtaacaattcagattcacttgggaatagcagaatttttttatacagggttaataatccttaaaatacttttatttccatgccttattagtatacatacttaagaaatggttcattgggcccgagtttcttgattttatttaatacaatcggatttaataattttgtggccagtaaaattataccattggcatgaagctgtgaaaaatgagaaattctacctttaccagggatatctgttctactgttttaaaagttcctctctattttattttttatttaacatgaagtaaaattgaaatttcttcttggtgtatagttctgtgaattttaacagaaagatttgtgcaccactactgcagtcggtacagaacagttccttcactcccaatagctctcttatgctgtccctttgtagtcagctccttctagctctaatcctggcaacagttctccgtcactattattttgccttttctggactgtcatataaacagaatcttatagtacgttccctcttgaaatgctttttcacccagcataatgactttgaggttcatccatgtcattttaaattttgaattggcaatatatattctagctgttactagatgagcaatttaaaaaggtgtagctattagtgttgtattttttcatttacattaatgtaatttccattcactatgtgttgataaaaatcttaaccatccctagagttttatatttccaaaaatatgccaaaaggaaaactatgactgtatgattattttagcgagagtcatatttgagatggtgttctgagccatagttctctaacatctccgtctacatataacacaaaacttttataaattattttaacaaagattaaaatatactgcagggcaaataatattctctaaaacacaggaactgcttttcgtaaagaagactgactagatgcatctttctttgaagctgttctagtcctcctctagttaacttagctttatgtagaatttctactgtatttaatttctattgaagcccttctgtattttaaaatgtaatatactttgtaccatttataaaaattgtgtgatgaatgaatcacatgttcgttgttataagtgttaacctttttttgacaattttgtgggaaagacattctccactgaattttaactttccttgagactttcaagaatgcaggtctcgtttgatgaaaaaaccgacttcataacccaatgttactagttagcgacattgtgctgaatttctccttgaactttttaactttatatgtaaaataactttgatcttggtcatttgaaagatcatttccaggtctaaaattccatgattttgtatttaattcttcctgagaacagaagaggggaaagcaagagaggacggttttgtgtctttatgaactttgttacttaagtactccattggagacataatttttctaattagtggatctttttccactggaaagtgtgatagctcattgctaatttttcattcatagttcattgcttccatttgacctaagattggccatttgttggtgtgaaaatattttcttttcagaaatagtttactagtgattgaagtacttttcttatttttgcttcctattataaaatggcgtggggggaagggggaaggatggagatgggaggagagggtaaaagaatagtactctgattttttaagaattagtatctactatcttggatatttgaaaaaaaattggttgaaactatgtttaagttttatgtgtgccttgtaagattgttgtaaaattttttgtgagcactttgagatttttgctgggggaggggtgttttgtgaaagtgatggttattatttatattatttattcctgttcagtagcacggaatgatctccaaacattcctaggagagtgtctgtttgcatgatatgtctaaaaattttcaggaaaatggaatctttttttaaagttcaggtatgacaaagtatagaatttattcatttaacatattcacatttagtttatgtttctgatatgacagaaaaatgaaaagtgtttgagttcagcctcttcatttactccatttacatataaaagatcttgaaaaggtagttgttacttcgttgtcagagaaaaacacttgccctttttcctgggatgtaactatcttacatgtttacataagaaataataaactggaggtgggaatggaaaaaaaaaagaaaaaaaaaaaa

SEQ ID NO: 1191 - DNA, 2113 bp, Homo sapiens
ggtgcagaagtctgggcagctgcgggaggagaggtttgggaggcgcgggagatgtccaccctgggctggtggcgccgccgggcgccgggcgccatgagggtgcgctaggcggctgttcgtgcccgaggctgcgcagcactgagctttgccttcttgatcttccgtccttcttggagacgactggcgagaggaagagggactaggtccaaacgctaggtggctgggtccagccggagacccgcaccaaggaggagatcatcgagctcttggtccttgagcagtacctgaccatcatccctgaaaagctcaagccttgggtgcgagcaaaaaagccggagaactgtgagaagctcgtcactctgctggagaattacaaggagatgtaccaaccagaagacgacaacaacagtgacgtgaccagcgacgacgacatgacccggaacagaagagagtcctcaccacctcactcagtccattctttcagtggtgaccgggactgggaccggaggggcagaagcagagacatggagccacgagaccgctggtcccacaccaggaacccaagaagcaggatgcctccgcgggatctttcccttcctgtggtggcgaaaacaagctttgaaatggacagagaggacgacagggactccagggcttatgagtcccgatctcaggatgctgaatcataccaaaatgtggtggacctcgctgaggacaggaaacctcacaacacaatccaggacaacatggaaaactacaggaagctgctctccctcggtttccttgctcaggactctgtccctgcagaaaagaggaacacagagatgttagacaatctgccatctgctgggtcccagttcccggacttcaaacacttaggaacatttctggtgtttgaggagttggtgaccttcgaggatgtgcttgtggacttcagcccagaggaacttagttcccttagtgctgctcagagaaacctctacagggaggtgatgctggagaattaccggaacctggtctccctggggcaccagttctctaaacctgacattatctcacgcctggaagaggaggaatcatatgcaatggagacagacagcagacatacagtgatttgtcaaggagagtctcatgatgatccattggaaccacaccagggcaaccaagagaaacttttgactcctataacaatgaatgaccccaagaccctcactccggaaagaagctatggcagtgatgaatttgagagaagctctaatcttagtaaacaatcaaaggatcctctaggaaaggatccccaggaaggcactgctcctggaatatgtacgagtccccagtcagcatcccaagagaacaaacacaacagatgtgaattttgcaaacgaacctttagtacgcaagtagcccttaggagacacgaacggatccatactgggaagaaaccctatgaatgtaaacagtgtgctgaagccttctatctcatgccacacctcaacagacatcagaagacccattctggtaggaagacttctggctgcaatgaaggtagaaagccttccgtccagtgtgcgaatctctgtgaacgtgtaagaattcacagtcaggaggactactttgaatgttttcagtgcggcaaagcttttctccagaatgtgcatcttcttcaacatctcaaagcccatgaggcagcaagagtccttcctcctgggttgtcccacagcaagacatacttaattcgttatcagcggaaacatgactacgttggagagagagcctgccagtgttgtgactgtggcagagtcttcagtcggaattcatatctcattcagcattatagaactcacactcaagagaggccttaccagtgtcagctatgtgggaaatgtttcggccgaccctcatacctcactcaacattatcaactccattctcaagagaaaactgttgagtgcgatcactgttgagaaacctttagtcacagcacacacttttctcaacattattggcttcctcctagagtgttgtgagtgtgagaaggcctttcactagccccaccttgttaacaacttgaacattcatcaaagtgtggtaaaaaaaaaaaaaaaaaaaaaaa

SEQ ID NO: 1192 - DNA, 2627 bp, Homo sapiens
ttccattggaaactgattgggcagatttgaaaattaagctttcacaatcacaatttttatgagagttcattcagttttggagaagtcgaggaaagaattgggaattgaaattttgatgtggcctgataggatcaggtggggcttttgataggaagtgagtgttttgggttgtttcttgactggattatgatgcggaatacagcgggtagagggccgattaagttttagtcattagtgtagcttttcagtatacacgccttttcattttcagtccctttcagaagaaaagaccacaggcatcagaaatcaatcaacttgctaatttatgccagattccactggagatctgccttcccaagactttactgactggtgaagaacaggaaatgaacaattcccagggaagagtgaccttcgaggatgtcactgtgaacttcacccagggggagtggcagcggctgaatcccgaacagagaaacttgtacagggatgtgatgctggagaattacagcaaccttgtctctgtgggacaaggggaaaccaccaaacccgatgtgatcttgaggttggaacaaggaaaggagccatggttggaggaagaggaagtgctgggaagtggccgtgcagaaaaaaatggggacattggagggcagatttggaagccaaaggatgtgaaagagagtctcgcaagagaagtcccatcaatcaataaggaaacgctgactacgcagaaaggtgtagaatgtgacggatctaagaaaatacttccactgggcatagatgatgtatcttccttgcaacactatgtacaaaataattctcacgatgataatggatacagaaaattagttggcaataatccatccaaatttgtaggacaacaactgaaatgtaatgcctgtagaaagttattcagttcaaagtcacgccttcaaagtcacctgaggaggcatgcctgtcaaaaaccctttgaatgtcatagctgtggaagagcattcggggagaagtggaagcttgataaacatcagaaaactcacgcagaggaaaggccctataaatgtgagaactgtggaaatgcctacaagcagaagtcaaatctctttcaacatcagaaaatgcatactaaagagaaaccctatcagtgtaagacatgtggaaaagccttttcctggaaatcatcctgcattaatcatgagaaaattcataatgccaagaaatcctatcagtgtaatgaatgtgagaaatccttcaggcagaactcaaccctcattcaacataaaaaagttcacactggacaaaaaccctttcaatgtacggactgtggaaaggctttcatttacaagtcagatcttgtgaaacaccagagaatacacacgggagagaaaccctataaatgtagcatatgtgagaaggccttttcccagaaatccaatgtcatcgatcatgagaaaattcacactgggaagagagcttatgagtgtgatctatgtggaaatacctttatccagaagaaaaacctcattcaacataaaaaaatccatactggggaaaagccctatgaatgtaacagatgtggaaaagccttctttcagaagtcaaaccttcatagccatcagaaaactcatagcggagagaggacctatagatgtagtgaatgtggaaaaaccttcatccggaaattaaaccttagtttgcataaaaaaacccatactggacaaaaaccttatggatgttctgaatgcggtaaagccttcgctgacaggtcataccttgttaggcaccagaaaagaattcactccagataggagccccatgcacttaaaaaaacatgggaagatatggttgcctggaattgtcaccccagaattccatgttgaaatggcctctaatttggaggctatttttgaaggtagcgaggacttattatcacagtatcctttgaaaacccattcggcatactcactcagcaaatgtttattaagtataaatatttattagatgccttttgtgtaccaggaactcttaaacactgaagatgtagcaataaaccaaatgtgctaaaaccctgatggagttttattccagtgaataatgaccagtggtatccatatctttaaaaacgtttaaaagactatacttttggccaggcgtggtggctcaaatgcctgtaatcccagtactttgggaggctgaggtgggcgcatcacctgaggtcaggagttcgagaccagcatgaccaacatggtgaaaccctgtctctaccaaaaatacaaaaattagccaggcatagttgtgggcacctgtaatcccagctacccgggaggctgaggcaggagaattgcttgaacctgggaggtagaggttgcagtgagccaatattgcaccattgcactcctgcctgggcaacaagagcaaaatttcatctcaaaaataagataaaataaaataaacaaataagacagcactttatacttttagggatgatttctataattcatgagtggagaggtttctctagaggtgtaggggactggaaaccacatccaggaagtacagctttctctcctgagcatgaaggtatcttggcatttcttcactgcaattgccatttgccttttttgtttttc

SEQ ID NO: 1193 - DNA, 3162 bp, Homo sapiens
gcgggaaagaaagcttgccccagaggacttaaacaggcaagaaggacttggttaaagactattgcaatagtcaacttccaatacaacagcagctggagatttatagctaacgggctgggtgaaggagttaaaggatgctaaattactaagaggaagtgatgggcagtaggggctgagcaaagataacttctgacatagtcaaaccaactccctctcagaagaacctgatgtttcctgactgctttctccttcctcagccctgccctgcttggatagaggcctccgaacaggagtaaagaatggctgttgaacatccacaaggcacctgcaagactatgaatcaaagttgagaccaagaaattatttctgaaaaaggatatggaaaaccttacaaaacacagcattgagtgttcaagtttcagaggtgattgggaatgtaaaaaccagtttgagagaaaacagggatctcaggaaggacatttcagtgaaatgatatttactcctgaagacatgcccactttcagtatccagcatcagagaattcatactgatgagaaactccttgaatgtaaggaatgtgggaaggattttagttttgtatcagtccttgttcgacatcagcgaattcatactggtgagaaaccttatgaatgcaaagaatgtggcaaggcctttggtagtggtgcaaaccttgcttaccatcaaagaattcatactggtgagaagccttttgaatgtaaagaatgtgggaaggcctttggtagtggctcaaaccttactcaccatcagagaattcatactggtgagaaaccctatgagtgtaaggaatgtgggaaagcctttagttttggatcaggccttattcgacatcagatcattcacagtggtgagaagccttatgagtgtaaggaatgtgggaagtcctttagttttgaatcagcccttattcggcatcacagaattcacacaggtgagaaaccttatgaatgtatagattgtggtaaagcctttggcagtggttcaaaccttactcaacatcggcggattcatactggtgagaaaccttatgaatgcaaagcatgtggaatggcctttagcagtggttcggctcttactcggcatcagagaattcataccggtgagaaaccatatatatgtaatgaatgtggtaaggcctttagttttggatcagcccttactcgacatcaaagaattcatactggtgagaaaccttatgtatgtaaggaatgtgggaaggcttttaatagtggctcagatctcactcagcatcagagaattcacactggtgagaaaccctatgagtgtaaggagtgtgagaaagcctttagaagtggttcaaaacttattcagcatcaaagaatgcatactggagagaaaccttatgaatgtaaggaatgtgggaagacctttagtagtggttcagaccttactcaacatcacagaattcatactggtgagaaaccctatgaatgtaaggaatgtgggaaggcctttggtagtggctcaaaacttatccaacaccagctaatccatactggtgaaagaccctatgaatgtaaagaatgtggaaagtcctttagtagtggttcagctcttaatcggcaccagagaatacacactggtgagaaaccctatgaatgtaaggagtgtgggaaggctttttatagtggctcaagccttactcagcatcagagaattcatacaggtgagaaactttatgaatgtaagaactgtgggaaggcttatgggagggattcagagtttcagcaacataagaaaagtcataatggtaagaaactctgcgaattggaaactataaattgaaattatgtgctgaaggaaggactctaaacatatgacttaagaaaattcatagtggtgaaaatctctacaaatagaactaaggtacaaatgccttacttatgcttcacaggttagtcagtctaagaatatttatacaggaaaaaaatcaccccaaataaaataaatatttgaagatccttatctatattcattccttcattacttttggaaaattcttacttgtgaatgttaaaaatgaaaaaaaaatcatttattatattttgcctcaactttaaacattggaaaactcatttctgggttaatcctactatattttttcaatggtcttttttttttgtattatacagaattactgattcattgaaaaattattttatttattgcaagtctaaatttatcctttttttctttcctgattatcctaacaccatttattcaataaccttgtccattttcatattttttttattgactatttgatggtaagttacatttttattcacataaagcttggatatcaggtcagtgtttttttgtttttgtttttgtttttgtttttttgagatggagtctcactgtcaccaggctggagtgcagtggtgcaatctcggttcactgcaacctccacctcccgagttcaagtgattttcctgcctcagctccccagtagctgggactacaggcgcccgccaccacgcccagctaattttttgtattttcattagagatggggtttcaccacgttggccaggatggtctcgatctcttgacctcgtgatccatctgcctcggcctcccaacgtgctggaattacaggcatgagccaccatgcctggcccagtgtttgttttttaaatttatatatatgtatctatgtctcatcctgtttatggtcaataactgttacttttaagtatcctttaatacctgtaccttttgttttagaagattgtttactttccttttataaaattatactctccattttagcaaaacagctttccctcatcataatgtagataaaaagaaaaaaaggatatggttacctgtaatcttaccaatcatagataatcactgtcaaacttttggagcaaatcctttaatactatctctcattgttttggaaacaaggtgtgattatgctatactataaccagcccttaatattttttgtctgtaaatatgttgttaccattttattggctttatagtattcacctgtctttatcaaaccccaattttgtcaaatattaaaaattttgccattataaaaaaaaaaaaaaaaaaaaaaaaaaaaaaaaagaaaaaaaaaaaaaa

SEQ ID NO: 1194 - DNA, 4479 bp, Homo sapiens
aatcaggcatgcagctggagcggactggacggcttccgggtttggcggggtctttgtctctcgctgtagccggagctccaggttttgctctcacttctctgtgtcttctgctcctaggggcctagcctgtgtggccctctgacctgcagatattgggagatccacagctaagacgccaggaccccctagaagcctagaaatggatgacccgaggtatggaatgtgtcctctcaagggagcaagtggatgccctggggctgagaggagtcttctggtgcagtcttattttgaaaaggggccattgacgtttagggatgtggccatagaattctctctggaggagtggcaatgcctggacagtgctcagcagggtttgtataggaaagtgatgttagagaactacagaaacctggtcttcttggcaggtattgctctcactaagccagacctgatcacctgtctggagcaaggaaaagagccctggaatataaagagacatgagatggtagccaaacccccagttatatgttctcattttccccaagacctttgggcagagcaggacattaaagattcttttcaagaagcgattctgaaaaaatatggaaaatatggacatgacaatttacagttacaaaaaggctgtaaaagtgtggatgagtgtaaagtgcacaaagaacatgataacaaattaaaccagtgtttgataactacccagagcaacatatttcaatgtgatccatctgcaaaagtctttcatacattttcaaattcaaacagacataagataagacatactagaaagaaacctttcaaatgtaaaaaatgtgaaaaatcattttgcatgcttttacacctaactcaacataaaagatttcatattacagagaattcctaccaatgtaaagattgtggcaaagccttcaactggttctcaacccttactacacacaggagaattcatactggagagaaaccctacaaatgtgaagaatgtgggaaagcatttaaccggtcctcacaccttactacacataagataattcatactggagagaaaccatacagatgtgaagaatgtgggaaagcttttaaccggtcttcacaccttactacacataaaagaattcatactggagtgaaaccctacaaatgtacagaatgtggcaaagcttttaaccggtcctcacaccttactacacacaggataattcatactggagagaaaccctacaaatgtgaagaatgtggcaaagcctttaaccagtcctcaacccttactacacataagataactcatgctggagagaaaccttacaaatgtgaagaatgtggcaaagctttttaccgattctcataccttactaaacataagacaagtcatactggagagaaattctacaaatgtgaagaatgcggcaaaggctttaactggtcctcagccctcactaaacataagagaattcatactggagagaaaccctacaaatgtgaagaatgtggcaaagcttttaatgagtcctcaaaccttactacccataagatgattcatactggagagaaaccctacaaatgtgacgaatgtggcaaagcctttaaccggtcctcacaactaactgcacataagatgattcatactggagagaaaccctacaaatgtgaggaatgtggcaaagcttttaaccgatcctcaacccttactaaacataagataactcatactggagagaaatcttacaaatgggaagaatgtggtaaagactttaaccagtccctaagccttattaaacaaaataactcatactggagagaaaccctacaaatgtgaaaaatgtggcaaagccttttaccagtcctcaactcttactaaacataaaaaaattcatactggagggaactcctgtgactgtgaagaatatggcaaagcctttaataaattctcaattcctaacagacataagataattcatactagagagaaattctacaaaccagaaagatgtgacagtgctttgaaaacacctcaaacttttcaaaacataaatcatagtgttgagaaatcctagaaatgtgaagaatgtgataaagttttaaatggttgtcacacttgattgtaggtaaggtaagttatactggagaaaacttctacatgtgtgaacagtgtgacaaaacttttaactaatgctcacaccttcacaggaaagcatttatacttgagaaatattgtacaaatataaagactgtgaaaaagccattaatacatgctcacatcttactcaacatcagagagttcatactcaataaaaacataagtgcaactactgtcaaaatatctttaagaaaatataagcttttaaagtgaagagtattttgaagaagaacattgtagtagaattgtaatatgtttacttgtatcacagatcttactgtacacgttttgtattagaggaaacctctgaagcagttgctcaaactttgttcaatatcagggaatttatattgaaaaaaactgtgcgaatgtaataaagttggaaaaatactttttcaaaaactacagcttagaaaacaccagagagttcatactaaaacatatttttgcagatacaggaaaaattttttaaaaattttaatcattaagtctgtaaatatcagagaatttacagtagaaatatgtaaggcactgatgcttcaggtattttactaaatcagagtgctgagtatagaaaataatctaaaactaaaattggtaaaatatttgtatataactttaaaagtagaaattttttgcagttattgcattcaaagtatgcttaactttttgaaaaaattagattttttgaaaagtgagtaataatgtaattcaactcttaaattatttcctgccttttcttcactcctatttacatgtgaaagcatgtgatcaattgttgctgcatcagatatgagagattcttttttattaggtgagcattatttataaactttgctatgaaaaagacattaaaatatgagatgtatgatgaaaatctaagtgaagagacttttatggttaacttataatattaagcaatgtgtgcgttaggcattcagagtaatattctgcattatgagaaaacttaatttcatttataagtaaattaaaattagtatattttactaatacttttatataaaatgcagtatattttttaaatttcagattatatgtgatgttaatatattcaacctttttaacatgttaaatactattgtgcattcagtgaagtgttattatgccacagacattaacctattccaccttactcaagggtgtacgtaaaacatggtaacagtatactatttggtaacataatggattaacatctctagtaatctcttttgctagtggctttgactgcaaataagttaaagaatattatttctgtaggttaaatttttgtttttattttattttatttttgagaggtagtcttgctctgtcacccaggctggagtgcagtggcacgatctcggctcactgtaacctccacctcctgggttcacgcaattctcctgcctcagcctcctaagtagctgggattacaggcacccaccaccatgcccagctaatttttgtattttagtagagacagggtttcataatgtaagtcaagctggtctcgaactcctgaccttaaatgatttgcctgcctcggcttcccaaagttctgggattacaggcatgagccaccgtgcccagccaaatgtttattttatttaaatttatttttcttaattatttggggtacataatatgagtatatattcatgcaatatatggcatattttgatacaagaatacagtatataataatcacatcagggtaaatgaggtatccatcacctctagtatttatcctttgtattacaagcaacccagttttatacttttagttattttaaaatgtaaaattaaattgttattgattacagtgttatttttatggtcataataaaagttatgtagaagtataataaaatccctacatttctgaggcctgaataagtatttttaaagttttctaatatttattttttgagcatgtttcctgtctgcctgcaaacacatgcagacatttagttttgatttacatatagttaaatatatgttagtctaaagataaaccttaagtgtaagaaaattatagagtgagtttgtgtgtatgaatttgtacctgttttccgaagaaaaaagcaatactgaacaaaacaaatcattttaacaagatgactactagaaaactaaaagcctcaaaaatgctaaaagaaaatgtattctctgctttgtattgaatttattactgtacattctgtggcttatagttctgaatctccccatgaaaattctgtttatacttgcctggtactcatgatagacccctaattattttgtatcttttttcatataaatattttacagattatgaagtaaaaaaaaaa

SEQ ID NO: 1195 - DNA, 1389 bp, Homo sapiens
gaattcgggagagaactacagaaacctggttttcttgggtgaaggtattgctgtctctaagccagacctgattacctgtctggagcaaggaaaagagccctggaatatgaagagacatgagatggtagctaaacatttagttatgttttattattttgcccaacacctttggccagagcagaacataagagattctttccagaaagtgaccctaagaagatatagaaaatgtggatatgagaatttacagttaagaaaaggctgtaaaagtgtggttgagtgtaaacagcacaaaggagattatagtggacttaaccaatgtttgaaaactaccttgagcaaaatatttcaatgtaataaatatgtagaagttttccataaaatttcaaattcaaatagacacaagatgagacatactgaaaataaacattttaaatgtaaagaatgtcgcaaaacattttgcatgctttcacacctaactcaacataaaagaatccatactagagtgaatttctacaaatgtgaagcatatggaagagcctttaactggtcctcaacccttaataaacataagagaattcatactggagaaaaaccttacaaatgtaaagaatgtggcaaagcctttaaccagacctcacaccttattagacataagagaattcatactgaagagaaaccctacaaatgtgaagaatgtggcaaagcctttaaccagtcatcgacccttactacacataatataattcatactggggaaattccctacaaatgtgagaaatgtgttagagcttttaaccaagcctcaaagcttactgaacataagttaattcataccggagagaaacgttatgaatgtgaagaatgcggcaaagcttttaaccgatcctcaaaacttactgaacataagtacattcatactggagagaagctgtacaaatgtgaagaatgtgacaaggcctttaacctgtcctcaacgcttactaaacataaggtaattcatactggagagaaactgtacaaatgtaaagaatgtggtaaagcttttaaacagttctcacaccttgctatacataatataattcatactggagagaaactctacaaatgtgaagaatgtggcaaagcttttaactcatcctcaaaccttactgcacataagaaaaatcgtactggagagaaaccctacaaatgtgaagaatgtggcaaagctaacctatcatcaacccttactccacataagacaattcatatttgagagaaaccctgcaaatgtgaagaatgtggcaatgcttgtaactaaatctcaaactttactaaacataagaaaattaatactggaaactttacaaacctgaaagatgtgacaatgattttgaccccgaattc

SEQ ID NO: 1196 - DNA, 669 bp, Homo sapiens
tgtcagtgtgattcatgtggaatgagtttcaacactgtttcagaattggttatcagtaagataaactatttaggaaaaaagtctgatgaatttaatgcctgtgggaaattgttactcaatattaagcatgatgaaactcatactcaagagaaaaatgaagttttgaaaaataggaacacactgagtcatcatgaggagactttgcagcatgagaagattcaaactttagagcacaattttgaatacagtatatgtcaggaaaccctccttgaaaaggcagtattcaatacacagaagagagagaacgcagaagagaataactgtgattataatgaatttgggagaactttgtgtgatagttcatccctcttgttccatcagatatctccgtcaagggacaatcactatgaatttagtgattgtgagaagttcttatgtgtgaagtccaccctttctaaacctcatggggtatctatgaaacactatgattgtggtgaaagtgggaataatttcaggaggaaattgtgtctgtcacaccttcagaaaggtgataaaggagagaaacactttgaatgtaatgaatgtgggaaagctttctgggagaagtcacatctcactcgacatcagagggtgcacacaggacagaaaccctttcaatgtaatgaatgt

SEQ ID NO: 1197 - DNA, 1136 bp, Homo sapiens
gaattcccaagccagagctttccagaagtctggacagctgatcacctgaaagagaggagccaagaaaatcaatctaaacatttgtgggaagttgtattcatcaataatgaaatgctgactaaggaacaaggtaatgtaataggaataccatttaacatggacgtaagttcttttccttccagaaaaatgttctgtcagtatgactcatgtggaatgagtttcaacactgtttcagaattggttatcagtaagataaactatttaggaaaaaagtctgacgaatttaatgcatgtgggaaattgttactcaatattaagcatgatgaaactcatactcgagagaaaaatgaagttttgaaaaataggaacactctgagtcatcgtgagaacactttgcagcatgagaagattcaaactttagaccacaattttgaatacagtatatgtcaggaaaccctccttgaaaaggcagtattcaatacacggaagagagagaatgcagaagagaataactgtgactataatgaatttgggagaactttctgtgatagttcatccctcttgttccatcagatacctccatcaaaggacagtcactatgaatttagtgattgtgagaagttcttatgtgtgaagtccaccctttctaaacatgatggggtacctgtgaaacactatgattgtggtgaaagtgggaataatttcaggaggaaattgtgtctgtcacagcttcagaaaggtgataaaggagagaaacactttgaatgtaatgaatgtgggaaagctttctgggagaagtcacatctcactcgacatcagagggtgcacacaggagagaaacactttcaatgtaatcaatgtggaaaaactttctgggagaagtcaaacctcactaaacatcagagatcacacacaggggagaaaccttttgaatgcaatgaatgtgggaaagcctttagccataagtcagccctcacattacaccagagaacacatacaggggagaaaccctatcagtgtaatgcatgtgggaaaactttttaccagaaatctgacctcactaaacatcagagaacacacacagggcagaaaccctatgaatgttatgaatgtggaaaatccttctgtatgaattc

SEQ ID NO: 1198 - DNA, 224 bp, Homo sapiens
actggagagaagccctttgcatgtaagggttgcaagaaggcattcgatcagaaaataaccctgattcagcacgagggagttcacactggtgagaaaccttatgagtgtagaaggtgtgggagcccctcagctggtgtggaaacttcgttatgcatcagaagccacacactcaaaaggcacccatttaagcatagggctagccactatcaggctcactacacccc

SEQ ID NO: 1199 - DNA, 1674 bp, Homo sapiens
ggcctttgtctctcgtgcccgcacgtgcgtgtctcggtcagtagccctgcgcttctccttcactctcggcggttcaggaggctctgccgcagccggggccctcctgtgacctgcatgtactgggggattcgcagggaggatgtcgggacaccccggaagctgggaaatgaactcggttgcctttgaggatgtggctgtgaacttcacccaggaggagtgggctttgttggatccttcccagaagaatctctatagagacgtgatgcaggaaaccttcaggaatctggcttccataggaaacaaaggggaagaccagagcattgaagatcagtacaaaaattcttcaagaaatctaagttcatttcagatacatcagagaaatcacactggagagaaaccctatgaatgtatggaatgtgggaaagccttaggtttttcccgttctcttaatagacataaaaggattcacactggagaaaaacgctatgaatgtaagcaatgtgggaaagccttcagtcgttccagtcaccttcgtgaccatgaaagaactcatactggagagaaaccctatgaatgtaagcactgtgggaaagccttccgttactccaattgccttcattaccatgaaagaactcacactggagagaaaccttatgtgtgcatggaatgtggcaaagctttcagttgtctcagttccttgcaaggacatataaaggctcatgctggtgaagaaccctatccatgtaagcaatgtgggaaagccttcagatacgccagttcccttcagaaacacgagaaaactcatattgcacagaaaccctatgtatgtaacaattgtggtaaaggcttcagatgttccagttcccttcgtgaccatgaaaggactcatactggagagaaaccctatgaatgtcagaaatgtggcaaagcctttagtcgtgctagtaccctttggaagcataaaaaaactcatactggagaaaagccctataaatgtaaaaaaatgtaaaggctttaatcactacagtttttgtcaaaaacatgaacagtcacatacttgagagaaactgtgaatgtaaggtgtaggaaagtacttaattttcccagatttcctcaaatacatgaaacgaatcaaactggagataaaccctatgactataagcaataaggtaaagcattcaatttttccatttctttttgaaaacttgaaaggactcactgaagaaaatccatatgaatgtttaaaatgtggtaaggcctgcagttgttccagtggtatttgatggtataacataactcattctagagaaaaactttatgaaggtatcgaatgtgagaatgccttcatttatcctataactcactcagagacacatggtaacacatactccagattgaccttataaataaaagaatgcccaccagattgaaatcctagaaatacagaaaattctgaattttaacaattactttaaaggtcatgtgaaaactcccactggaaataaatcctgtaaatgtaaatattatggaaaaccttatggaaaataattatagtacaattctcaagaaaattcactatgtgaatgagatgttttaggagctataaataaattgaatatattggttgctcatttttgaagagagtctctagaatatagattttcacttcttttg

SEQ ID NO: 1200 - DNA, 348 bp, Homo sapiens
acatatcacatgtgccaatttcattgcaggtatgtaaataatcatagtggagagaaactctatgaatgtaatgaacgttctaaagccttttcatgtcccagtcatctccaatgtcataaaagaagacaaattggagagaaaacacatgaacataaccaatgtggtaaagcctttccaacacccagtcatcttcaatatcatgaaagaacccatactggagagaaaccttatgaatgtcatcaatgtggtcaagcctttaaaaaatgcagtcttctccaacgtcataaaagaacacatactggagagaaaccatatgaatgtaatcaatgtggtaaagcctttgcacaa

SEQ ID NO: 1201 - DNA, 295 bp, Homo sapiens
tatgaatgtaatcaatgtggtaaagcctttgcacaacacagtagtttaaaatgtcattacagaacacatattggagagaaaccctatgaatgtaatcaatgtggtaaagccttttcaaaacacagtcatctccaatgtcataaaagaacacatactggagagaaaccctatgaatgtaatcaatgtggtaaagcattttcacaacacggtcttctccaacgtcataaaagaacacatactggagagaaaccctatatgaatgtaatcaatatggtaaagcctttgcacaactcgg

SEQ ID NO: 1202 - DNA, 2040 bp, Homo sapiens
tgctctaaagcaaatgttatcactgagtcattgccatctgcagaatcagaacctgttgaaattgaggtagagattgccgaagccattgaagtggaagatgaaggcatcgaaacattagaggaagtggcttctgccaagcagtccgtaaagtacatacagagcacaggttcctctgatgattctgctctagcactgttggcagatattaccagcaagtaccgtcaaggtgacagaaaagggcagattaaagaagatggctgtccatctgaccccacgagcaaacaggtagaaggtattgaaattgtggaacttcagctgtcacatgtgaaggacttgttccattgtgagaaatgtaaccgttcatttaaattgttttaccattttaaggagcacatgaaatcacactccactgagagtttcaagtgtgaaatatgcaataaacgatatcttcgagagagcgcatggaaacagcacctaaattgttaccaccttgaagaaggtggagtcagtaagaagcaaagaactgggaaaaaaattcatgtatgtcagtactgtgagaaacagtttgaccattttggacattttaaagaacatcttcgaaaacatacaggtgaaaaaccttttgaatgtccaaattgtcatgaacgatttgctagaaatagcactctgaaatgtcacctcactgcatgccaaactggagtaggggcaaaaaaaggaaggaagaagctctacgaatgccaggtctgcaacagtgtgtttaacagctgggaccagttcaaagatcacttggtaatacacactggagataaacccaaccattgtactttatgtgatttgtggtttatgcaaggaaatgaattaaggaggcatctcagtgatgctcacaatatttcagagcgtctagtaacggaagaagttctttcagtagaaacacgtgtgcaaactgaacctgtaacatcaatgactattatagaacaagttgggaaggtgcatgtgctaccattgcttcaggttcaggtggattcagcacaagtgactgtggaacaagtccatccagatctgctccaggacagccaggtgcacgattcacacatgagtgagcttccagagcaggtccaagtgagttatctagaagtgggccgaattcagactgaagaaggtactgaagtacatgtagaggagctgcatgttgaacgggtcaatcaaatgccagtggaagtacaaactgaacttctagaagcagatttggaccacgtgaccccagaaatcatgaaccaagaggagagagagtctagccaagcagatgctgctgaggctgccagggaagatcacgaagatgctgaggatttagagaccaagccaacagtggattctgaagcagaaaaggcagagaatgaggacagaacagctctgccagttttagaatgaaattacacatgaatatatttttaaatttacttgttgggtttttgaactgattatgggcagtttgactgtccttaattaagcctaacagacaagtggaccaaagttaagctgtttcctgttgtgctgaactgttgtccgttgaaacacattgattcccctccccctacttattgccacagaggagggatcttttccataactgaaggggagttttgagaagtatatttctggaaacttaaatggattatattcttattatatagttgggtacgaatgtatctattttcattgtggtaaaagttcttccttttctctttcccaggtcatgttcttcctcaaattttttccatattgtaaaatcaaacttaaatcattagaatacaagtttatgtattctaatgcatgttagaaaattgaataatataggaaacacaaggctgcatgatgaaaagtgcattgttactgtgcagttaaattttggcttctggctttctttagtttgaacaaacgttcttgtctaccccagtagtcacagatgccatctttgcaacagaaagagtggtggtggcaaaatttctagaatgttctttagagcacactggggtaccggat

SEQ ID NO: 1203 - DNA, 3048 bp, Homo sapiens
gagccaatgaaagctcggaccagtggcaagtccgagctgtcattgagaggcgggacttccggcgccgccattgcggtcctcattttgctgctggtgggttgggctacagcaggcctctggagccacaccagggcacgggagtgggtgcagggaccgtcaccgcgccttcacacgcaccatagtgcccggctaattactctgcttttatgagccaaggtgttcccgaaagtggagccagcgccacgcgtctccagggtctccatacccagccttcgtccctgcggtgcccagaggccttgcgcgcattttgcatttgggaagacaggtcctgagtgcgaccgtcacccagcggaagtgtgagggttcggcccagcggcagggctagccctgggcctcctgttatggccctgcccagcccacaggttctaatggggttgccagcgttgctgatgggcccggcgcagcatacttcttggccctgtggctcagctgtccccacattgaagagcatggtaacctttgaagatgtggctgtatacttctcccaagaggagtgggagctccttgatgcagcccagaggcacctgtaccacagtgtgatgctggaaaaccttgagcttgtgacctcacttggttcttggcatggagtagagggtgagggggcccatcccaagcagaatgtttctgtagaagtgttacaggtcaggatccctaatgcagatccttccaccaagaaagctaactcctgtgacatgtgtgggccattcttgaaagacattttgcacctggctgagcatcagggaacacagtctgaggagaaaccctacacatgtggagcatgtgggagagacttttggttgaatgcaaaccttcaccagcaccagaaggagcacagtggagggaagccctttagatggtacaaggacagggacgcacttatgaagagctctaaagtccacctgtcagagaaccccttcacttgcagggaaggtgggaaggtcatcctgggcagctgtgacctcctccagcttcaagctgttgacagtgggcagaagccatattccaatcttgggcagcttccagaagtctgtaccacacagaaactcttcgagtgcagcaactgtggaaaagccttcctgaagagctccactctccccaaccatctgagaactcactctgaagagataccatttacatgcccaacaggtggaaatttcttagaggagaaatcaatccttggtaataaaaagtttcacactggggaaataccccatgtgtgtaaggagtgtgggaaggcctttagtcactcatctaagctgaggaagcaccagaaatttcacactgaagtaaaatattatgagtgcattgcatgtgggaaaaccttcaaccacaaactcacatttgttcatcatcagagaattcactcaggagaaagaccttatgagtgtgatgaatgtgggaaagccttcagtaacagatcacacctcattcggcatgagaaagttcacactggagaaaggccttttgagtgcctgaaatgtggaagagccttcagccaaagctccaatttccttcggcatcagaaagttcacacacaggtaagaccttatgagtgcagtcaatgtggtaaatccttcagccgaagctctgctctcattcagcactggagagttcacactggagaaagaccgtatgaatgcagtgaatgtggaagagcttttaacaataactccaaccttgctcagcaccagaaagttcacaccggagaacggccttttgagtgcagtgaatgtggaagagacttcagccaaagctcccatctccttcgacatcagaaagttcacactggagaacggccttttgaatgctgtgattgtggtaaagccttcagtaatagctccaccctcatccagcaccagaaagtacatactgggcaaaggccttatgagtgcagcgaatgtaggaaatccttcagccgcagctccagcctgattcagcactggagaattcacactggagaaaagccttacgagtgtagtgagtgtgggaaagcctttgctcacagctccactctcattgaacactggagagttcacacaaaagaaaggccttatgagtgcaatgaatgtgggaaattctttagccaaaactccattctcattaagcatcagaaagttcatactggagaaaagccttataaatgcagtgaatgtgggaaattctttagccgaaaatccagccttatttgtcactggagagttcacactggagaaaggccttacgaatgcagtgaatgtgggagagcctttagcagtaactcccacctggttcgtcatcagagagttcacacacaagaaaggccctatgagtgcatccagtgtggaaaagcctttagtgaaagatctacacttgttcggcaccagaaagttcacaccagagaaaggacttatgagtgtagccagtgtgggaaactcttcagccatctttgtaaccttgcacagcataaaaagattcatacctgagtggagccttatggaagtggtctttgtgagaaaatcttcagccaagtcaaacttcatgcagcagaatccccataccagaaaaattacctacatgtactgctaatgtggaaaagccttcagaagctactctgtttctgaccagcccaggaacctttgcagggccatctcacccatgcagcataaggcagaagccatagtcactttccatcttgcctggatccaaaaatttgcagcagtcctgtcctcatgcatggggaaaacagtaccctgagccttccttcctgtgttctctagggattcaggactgtgctcagctgaaccgatgctggttgaggggccttgagggaaatctaatttgagctcaggaagatgcacattccttgtggatgtggtcaagtctgtgtttaacccctaagatgtgtccattgaggccacaaatcaccctccactggaatcacctaccttgcctgcactaactggtgataataaagaccttattgatcaggtcaaaaaaaaaaaaaaaaaa

SEQ ID NO: 1204 - DNA, 2718 bp, Homo sapiens
cgccgagcatcctgggaggtgtggtccgggcgctgtgccgaggattcggggtagtgtagtcctggcgccccgctggaggagctccccagctggtggctggagcgaccccttgttctttggtggcgctgatctaccttctgagatatcatccttcttcagggagataaggaaaaaaagccacagggtcccggagagccaggggaatgcttcaaaagttctgctgcctgagagtaacgtcacagtaatggaacgggaagattctggaatctgtgtccccacctagacaacgattatactggcaggatctatcaggtgtacctattttggaactctggagtctagttgaaggcctccagttcccagggggaaggaagcatggaggtgtgtcctccatttggaagtagtgctaagaaaattaaaagaataaaactgggcaggggcatgagaataggatgcaaagatgaatttttggactgagtggccaagaagctccatggtgagcactcacagtctaaggctggaagtttaatgaactgttttctacatttcacaggcacacatggcattcagggatgtggctgtggatttcacccaggatgagtggaggctgctgagccctgctcaaaggactctgtacagagaggtgatgctggagaactacagcaacctggtctcactgggaatttcattttctaaaccagaactcatcacccagctggagcaagggaaagagacctggagagaggaaaaaaaatgttcaccggcaacctgtccagatccagagccagagctctacctcgatcctttctgccctccgggtttctccagtcagaaattccccatgcagcatgtgctgtgtaatcatcccccctggatcttcacatgcttgtgtgcagaaggtaacatccagcctggggatccgggcccaggggaccaggagaagcagcaacaagcctctgaggggagaccctggagtgatcaagcagaaggtcctgagggagaaggtgccatgcctttgtttggaagaaccaagaaaaggactctgggagcgttctccaggccaccccagaggcagccagtcagctctcggaacggcctcagaggggtggagttagaagccagcccagctcagacagggaaccctgaggaaacagacaaattgttgaagaggatagaagtcttaggatttggaacagtcaactgtggagagtgtggactgagcttcagcaagatgacaaacctgctcagtcaccagcggatacactcaggggagaagccctacgtgtgtggggtatgtgagaagggcttcagcctaaagaagagcctcgccagacaccagaaggcacactcgggggagaagccaattgtgtgcagggagtgtggacgaggctttaaccggaagtcaacgctaatcatacacgaacggacacactccggtgagaaaccttacatgtgcagtgagtgtgggcgaggcttcagccagaagtcaaacctcatcatacaccagaggacacactcaggggaaaagccttacgtgtgccgggaatgtggcaaaggcttcagccagaagtcagctgtcgtgagacaccagaggacacacttggaggagaagaccatcgtgtgcagtgactgtggcctgggcttcagcgacaggtcaaacctcatctcccaccagaggacgcactctggggagaagccctacgcctgcaaggagtgtgggcgatgcttcaggcagaggaccacccttgtcaaccaccagaggacacactcaaaggagaagccctatgtgtgcggggtgtgtgggcacagcttcagccagaattcaaccctcatctctcacaggcggacacacactggggagaagccgtatgtttgtggggtgtgtgggcgaggctttagtctcaagtcacacctcaacagacaccagaacatacactcaggagagaagcccattgtgtgcaaggactgtggccggggcttcagccagcaatccaacctcatcagacaccagaggacgcactcaggcgagaagcccatggtgtgtggggagtgcgggcgaggcttcagccagaagtcaaaccttgttgcacaccagaggacgcactcaggggagaggccgtatgtgtgccgagagtgcgggcgaggctttagccaccaggccggtctcatcaggcacaagcggaagcactcgagggagaagccctacatgtgcaggcagtgtggactgggctttggcaataagtcagctctaattacacacaagcgggctcactcggaagagaagccttgtgtgtgcagagagtgtggccaaggctttctccaaaagtcacacctcaccttacatcaaatgacacatacgggggagaagccatatgtgtgcaagacgtgtgggcggggcttcagcctcaagtctcacctcagcagacacaggaagaccacgtctgtccaccacagactgccagtgcagcccgaccctgagccgtgtgcagggcaaccttcggattccttatactctctctgaaggcaaagatggggacaaggactaagagtcagaatgttgacactttgatgaaatggagtagagaaatgcattctgtaagtggtcaaaggacatttgactgtttactttctccacactaagtcttctccatgttttgtggccttcggttgtaataaacttggcttctttatacatctgtaaaaaaaaaaaaaaaaaaa

SEQ ID NO: 1205 - DNA, 2248 bp, Homo sapiens
cgaactgtgatggcggcggccgcggtgatgggcccggcgcagatcctctgtggttgttgaattgtaacaagagagagaactctggctgcctgagagggcatgactctagtcacagcaggaggggcttggacaggccctggttgttggcatgaagtgaaggatgaagagtcatcttctgaacagagcatttctatagcagtgtcacatgttaatacttccaaggcaggtttgcccgcacagacggctctcccttgtgacatatgtggccccatcttgaaagatattttgcacctggatgaacaccagggtacacaccatggactgaaacttcacacatgtggggcatgtgggagacaattctggttcagtgcaaaccttcatcagtaccagaagtgttacagtatagagcaacccttaagaagggataaaagtgaggcctcaattgtgaagaactgcacagttagcaaagaacctcatccgtcagagaagccctttacgtgtaaggaggagcagaaaaacttccaggctactttgggtggctgccaacaaaaggccatccacagtaagaggaagacacacaggagcactgagagtggggatgcatttcatggtgaacaaatgcattacaagtgcagtgaatgtgggaaagctttcagccgcaaagacacacttgtccagcaccagagaattcatagtggagagaagccttatgagtgcagcgaatgtgggaaagccttcagccgcaaagctacacttgtccagcatcagagaatccatactggagaaaggccttatgaatgcagcgaatgtggaaaaaccttcagtcgaaaagacaaccttactcagcacaagagaatccacactggagaaatgccttataagtgcaatgaatgtgggaaatattttagccatcactccaatctaattgtacaccagagagttcacaatggagcaaggccttataagtgcagtgattgtgggaaagtcttcagacacaaatctacacttgttcagcatgagagtattcacactggagaaaatccttatgattgcagtgattgtgggaaatcctttggccacaaatacaccctcattaaacatcagcgaattcacactgagtcaaagccgtttgagtgcattgaatgcgggaaattctttagtcgaagttctgactatattgcacaccagagggttcacactggtgaaaggccttttgtgtgcagtaaatgtgggaaagactttatcagaacctcccaccttgttcgacaccaaagagttcacactggagaaaggccatatgagtgcagtgaatgtgggaaggcctacagcttaagctcccacctcaatcggcaccagaaagttcacactgcaggcaggctttaggagtgctttgaatacaacaggactcatcaatcagatgttgaatttcatgtatctgaacattgacacaaaggagataccttatggtgccaggtacgtgggaaccttctagggatatgttgcactttctgacttgctcaggttttttgccagagttatgtcactgtcaatccatgtggccgaaaccatcttaactctaccagctaagataccccagcattggggaaggcagggttttgtattgtccagtccctggagaaaatcatgaaatgcctgagttcattgggggtcctcattcccttctgtatgacaggtataggtatggatatgacccatttttagccaagagggtctgagctgtatctgctggtggcttatacaaaaagtttactttcttcatggatattcttggtctcacatacttgtaatcaagtttttccagcctccaagtcacctggcctgggaaagtacttgcctcatgttgctctggtttgtgataataaaggctttacagtttaagccacatttaatcttggggcttcttcttatggtctggggtggattgaaaacaggctctgccaaactgaagacagcctttgtgcggtgcctccaactttgcctcaaatgggacagtgggttgagggagaacagttcttagtccagttttgatgttaacttccatagctgacaaagcttgttaagtaagaattaagatcttgtgtagacctgatttgtctggattttagagttatttgagagcccatatttcaccttgaggagggtgctgctgctgtgacagcctgcagtgttttgaaacagcatggattgggtgtcttgtttgcagcatgtgtcccatgttccccaacac

SEQ ID NO: 1206 - DNA, 3408 bp, Homo sapiens
gaaatggagttaggctcgcgccggcgcagtgtcggctgccggtgccgcggcctttgtctcgcagtcaggaggggccagccgttcctgccagaagccagggcatgacccctggggtgcgcgtctccacagacccggagcaagtgacgtttgaggacgtggtagtgggcttcagccaggaggagtgggggcagctgaagcctgcccagaggaccctgtaccgtgatgtaatgctggacaccttcaggcttctggtctctgtgggacattggttaccgaagccgaatgtcatctccctgctggagcaagaggcagagctgtgggcggtggagtctagacttccccaaggcgtgtacccagagattaagggacatttccagtttttgcttctttcagacttggaaactagacccaaagtcaaactgtcagttctaaagcaaggcatctctgaagaaatatccaacagtgtcatcttggtagaaagattcctgtgggatggtctgtggtactgcaggggtgaggacactgagggccactgggaatggagttgtgagagtctagagagcctggcagtgccggtggccttcacgcctgtgaagacgcctgttctggagcagtggcagaggaatgggtttggggaaaacataagtctgaaccctgatctcccacatcaaccaatgactcctgaaagacaaagcccccacacatggggaacacgtggaaaaagggagaagccagacctaaatgttttacagaaaacctgtgtaaaagagaaaccctacaaatgtcaggaatgcggaaaggcctttagtcacagctcagcacttatcgaacaccaccggacgcacacaggagagagaccttacgaatgtcacgaatgcttaaaaggcttccggaacagctcggcacttaccaaacaccagagaatccatactggggagaaaccctataaatgcactcagtgtgggaggaccttcaaccaaattgccccactgatccagcaccagagaactcacacaggtgagaagccctatgaatgcagcgaatgtgggaaatccttcagttttaggtcctccttcagccagcacgagcgaactcacacaggcgagaagccctacgagtgcagtgagtgtgggaaagccttccggcaaagcatccacctcacccagcatctgcgaatccacactggggagaaaccctatcagtgtggtgagtgtggcaaggccttcagccacagctcatccttgaccaaacaccagcgaatccacacaggggagaagccctacgagtgccatgagtgtggaaaagccttcacccagatcacaccactgattcagcaccagaggacccacacaggagaaaagccctatgagtgtggtgagtgtgggaaagccttcagtcagagcacactcctgaccgagcatcggaggattcacacaggagagaagccctatggatgcaacgagtgtgggaaaaccttcagccacagctcctcactcagccagcatgagcggacacacacaggagagaagccctatgagtgcagtcagtgtgggaaggccttccggcagagcacacacctcacccaacaccagcgaatccacacaggggagaagccctatgaatgcaatgactgcggcaaggcattcagtcacagctcgtccctcaccaaacatcagcgaatccacactggggagaagccctacgaatgcaaccagtgtggcagagccttcagccagcttgctcccctcattcagcatcagaggatccacacaggagagaaaccctatgaatgtaaccagtgtggcagagccttcagccagagctcccttctcatcgaacaccagaggattcacaccaaggaaaagccgtatgggtgcaatgagtgtgggaaatccttcagccacagctcctcgctcagccagcacgaaaggacgcacactggggaaaagccctatgagtgtcacgattgcggaaagtcctttaggcagagcacccacctcactcagcaccggaggatccacacaggagagaagccatatgcatgcagggactgtggaaaggcctttacccacagctcctcccttaccaagcaccagagaactcacactggataaacccactccacatgtgctggggacataggaagaccttaagccatagctcatccctttctagatttgacccaatcatacacatgagaaacgtacattcatacacaagccttttcacacagcactcccctcagacaccctcagagagttcacactgatgggaaatgaccatgggaccaccaagctctaggtcatccatctctgcatccaaatagtagggaaacgtggagataatcaacactcaggaccttcagccttgaacgcccattagtgctatgttatagaacctacaaaaaagaaatggaacaaatgtagtggatccagggaacgcttttgtccaaggattcaccgtattccaaaccagagatgttcaaattggtgagaaacccaacaaatgcctttcatatatacgagaaccaaatgaagtcagaatttgccattattgcacatcacatttttgggggggaaagtgcttatgaatggtgcaggttgactctgatattcattcccaaatgacagtatggcagagtgttccagaaatgagagtggcatctttatggaatcactgtggatactgactgtctcagtaaacagctgtcttgtctgtgtgtatattgtttgatcagggtacatggcagccagtcacagattggaattacatatgacaaagtatcagtgtactataaacaggtttttagttatccctgcattatttttgcaattaatctttatatgcaatgagattgaaaagctttgtatgggaagactcaaaatgtaaagctgcttccgtagagtctcactgattctgagatggcttttgctgctctgttctccctctacatttctctgcagaactcgcgttagaaacacagatatttgttttacaaaaagggagatttttcctttgttaaaccatcgtcttataagcaatagcaaattcatgttagaaacttctgttttgcaagattcatcttttttgggatatgttcaagttaatcctctcaaactgctttttcattgttttcatacaatttaacattttgttaaaccctaagtccacaaatagcagtctttctgacaactataacctttaaatggtgacttgctgccctcattagaaattgcattggctggccaggcgcggtgacttatgcctgtaatcccagcactttgggaggccaaggtgggaggatcacctgaggtcgggagatggaggttgcagtgagctgagatcgtaccattgcactccagcctgggcaacaagagtgaaactctgtctcagaaaaaaaaaaaaaaa

SEQ ID NO: 1207 - DNA, 2988 bp, Homo sapiens
cagaggcccagagtggctcgcctggagtctctgtggcgcggtttcctgtacctgccttgggatccggagggaggaagctgggacacccgggagtcaggaaatggactcggtggcttttgaggatgtagatgtgaacttcacccaggaggagtgggctttgctagatccttcccagaagaatctctacagagatgtgatgtgggaaaccatgaggaatctggcctctatagggaaaaaatggaaggaccagaacattaaagatcactacaaacaccgagggagaaatctaagaagtcatatgttagaaagactctatcaaactaaggatggtagtcagcgtggaggaatttttagccagtttgcaaatcagaatctgagcaagaaaatccctggagtgaaactctgtgaaagcattgtatatggagaagtcagcatgggtcagtcatcccttaatagacacatcaaagatcacagtggacatgaaccaaaggaatatcaggaatatggagagaagccagatacacgtaaccagtgttggaaacccttcagttctcaccactcctttcgaacacatgagataattcacactggagagaaactctatgattgtaaggaatgtggaaaaaccttcttttctctcaaaagaattagaagacacatcatcacacacagtggatatacaccatataaatgtaaggtgtgtgggaaagcttttgattatcccagtagatttcgaacacatgaaagaagtcacactggagagaaaccctatgaatgtcaggaatgtggaaaagccttcacttgtatcacaagtgttcgaagacacatgataaagcacactggagatggaccttataaatgtaaggtatgtgggaaaccctttcattctctgagttcatttcaagtgcatgaaagaattcacactggagaaaaaccctttaaatgtaagcaatgtggtaaagccttcagttgttccccaaccttacgaatacatgaaagaacccatactggagagaaaccttatgaatgcaagcagtgtgggaaggccttcagttatctcccctcccttcgactacatgaaagaattcacactggtgagaaacccttcgtatgtaaacaatgtggtaaagcctttagatctgccagtacctttcaaatacatgaaaggactcacactggagaaaaaccttatgaatgtaaggaatgtggggaagcattcagttgtatcccaagtatgcgaagacacatgataaaacatactggagaaggaccttataaatgtaaggtatgtgggaaaccctttcattctctgagtccatttcgaatacatgaaagaactcacactggagagaaaccttatgtatgtaaacattgtggtaaagctttcgtttcttcaacatcaattcgaatacatgaaagaactcatactggagagaaaccctatgagtgtaagcaatgtgggaaagccttcagttatctcaactcctttcgaacacatgaaatgattcacactggtgagaaaccctttgaatgtaagcgatgtggtaaagcctttagatcttctagttcctttcgactacatgaaaggactcacactggacagaaaccctatcattgcaaggaatgtgggaaagcctattcttgccgtgccagctttcagagacacatgttaacacatgctgaagatggaccaccttataaatgcatgtgggaaagcctttaatgctctgggttcatgtcagatacattaaaatactcactgaagagaagccctatgaatgtaagtaacgtgggaaagcatgaaattctgtcagtgccttttttaatacatgaaagaattctagagagaagccatatacatgtaagtaacatgggaaagctttcaatcattttagttcctttcaaatacatgaaagaactcatcatggagaaaaccaaacaaatgctttttggaaaggaacccatatttgagagaaaccctgggtaaagggtgtaggaaaggttttgtcatcacacaaccctgtcacacatgaatgtgtagtggagagaaccttggtaaatgtaaagagtgtgggagagcctttagtcattttagttccacttgaagccatgaaagaacacacaaaagagaaagctcttgaatataagcaatgtccacacgtttttagccagcccacatgctttcaacaacatgtaagaatgtaccctggatcaaaacactataaatgtgaaaactacaaggaaggttttccattatacttttaaagtcatttgagggctctggctctgtggctttgtgggttaaagtacttgtctggcaaacaggagatgctggatttcaatcccagcagggcctcactagttgaggtattgaatttgaacagatgttttggctctggctgggtgtggtggctcacacctgtaatcccagcactttgggaggctgaggcaggaggatcacttgaggtcaggagtttgagaccagtgtgcaaaacatagcaagacctcatctcagaaaaaaaaaaaaagtcatttgaaaacttctaatacagcaaaatcctataaatgtaagtacttcaaaaagcctcatgcatagcgggtcatgtagtctctagaaaatacataacctgatggaaatgtagaagctatatgtatattttgttaattagtggctcatatttaaaatagttctctgactatggatttcaaatgcttaatctcacaaagaaatgttaaattgatataatcctgtaagtaatctgaaagcaatagtgcatgaatttcataggtagtgttgttttaggtcagtaaataaaatatttgtctttccattttgaaatgtgtttaatccaacaatgaatttaaatgtgtttctcatattcaggtatgttaaattgtatatggttgcttaattgttctgtgattgaggaccactgaaaaataagtcttaataaatgttggtatgaacctaaaaaaaaaaaaaaaaaa

SEQ ID NO: 1208 - DNA, 2501 bp, Homo sapiens
tggagagaaccttacacatttcacgagtatggaaagacctttgctcaaaattcagcccttgtaatgcataaggcaattcatactggaaagaaaccttacacatgtaatgaatgtggcaaggtttttagtagaaaagcacaccttgcatgtcatcatagacttcatactgtctaaggtttctaatcaacaatcaaaccttgcacaacatcagagagtttatactggagagaaaccttacaagtgtaatgagtggggcaaagccttaagtgggaagtcgtcacttttttatcatcaagcaatccatggtgtagggaaactttgcaaatgtaatgattgtcacaaagtcttcagtaatgctacaaccattgcaaatcactggagaatccataatgaagacagatcttacaagtgtaataaatgtggtaaaattttcagacatcgatcatatcttgcagtttatcagcgaactcatactggagagaaaccttacaaatatcatgactgtggcaaggtcttcagtcaagcttcatcctatgcaaaacataggagaattcatacaggagagaaacctcacaagtgtgatgattgtggcaaagtcttgacttcacgttcacacctcattagacatcagagaatccatactggacagaaatcttacaaatgtcttaagtgtggcaaggtcttcagtctgtgggcactccatgcagaacatcagaaaattcatttttgagataactgttccaaatacagtgactatagaagatcataaagctttaattgacattagagccaaataggcattgacttgagattgagttgacttaaccttgagtttaagaattaatttacattaaagtgtttatgttaagaagattgggccaggtgggattacaggcgcgagccaccgcgcccggcccctaagttaatatttcaaacaatcgaaggtaaaacaacatattgtgttgggccacctgtactgaacgctgaatcgtttttcctcttaagttgaaaatggttttaatgcaaagcgccttttttgagcaggtagagtcacgcatccggcaggcggggcgagctcccctctgtctggggcagggtgggggagaggggcagggacctcggtaaaggggtggagtggcgcgctggttgccgcgggcactggcaattagaagggattattaaactaagcaaggtcctgggttgtttgagtggataatggaaactgaaaggtgacgtgcaaaactgcctattactcccaggagtggaggataatttcatatttcatggaaataaactcagggcccggagcggtggctcacacctgtaatcccagcactttgagaggccaaggagggaggatcgcttaagcccaggaattcgaaatcagcctaggcaacatagtaagacctcatctctactaaaaataaaaaaaaacagccaggtgtgttagtccacacctgtggtcccagctgcttgggcttcccgagtagctgggattacaggtatgaaccactatgcccggctaactttgttttttttttttagaaattaaaccttttttcagcttaatgacccaggggtgtatttttgaaggacttgggagctctctttgaaaggcaaacaacaagggaaacagtacctttatctcagtaggaaattaaataattcaaacatcaaataacttcaatttaaggctatggactttgagataattctgagccttgagaggaatgtggtcaggcaacctgagtccagtggaatgcaggtgcaacttctaagagttttcctgtaagtaattaagaagactaagtagccccagagataagacctcctcggatcattgtcccttcttatgtagtgataaagtaaccttccttgaagtgtatctatccgtaatcaatcaagttgctgcagcctatgcactggcccagaataaaaaacgtggtgattctgctaaagcttctctgtctttccctgtgtgtgaaatcttaacgtctctacttgggaacgctgatcccattcatttagagttgatgtttccacgtggctatttccaagctttgccttcaaataaattctgtacttaatcatatattctaaattttattatttactgctgacatcagtttctgtcggattgtaggagcctcaccagagagggcccctgtcgccatgttgtaaaactcacacttgccaaaagttgtgggttagggtttctccccctccctcaggatgacgctagttagctgacacagatggtcacctccattaccaagtagagtcaggatgaactatgtgtgactgttcaactatgtgtcctcttccctgaggactgattagtgtttatcttgaaaacatgtccttaatgggttgtatagaacactgaagcatctgatttcaaactcttagctcttttcctctatttcccatcacattctggtctaaggcttatttattaataaaatgatttttatttctttattaaaaaaaaaaaaaaaaaa

SEQ ID NO: 1209 - DNA, 720 bp, Homo sapiens
ctaaagggctagagcagaacataaaagattctttccaaaaagtgacactgagcagatatggaaaatatggacataagaatttacagttaagaaaaggctgtaaaagtgtggatgagtgtaaggaacaccaaggaggttataatggacttaaccaatgtttgaaaattaccacaagcaaaatatttcaatgtaataaatatgtaaaagtcatgcataaattttcaaattcaaatagacacaagataagacatactgaaaataaacatttcagatgtaaagaatgtgacaaatcactttgcatgctttcacgcctaactcaacataaaaaaattcatactagagagaatttctacaaatgtgaagagtgtggaaaaacctttaactggtccacaaacctttctaaacctaagaaaattcatactggagaaaaaccctacaaatgtgaagtatgtggaaaagcctttcaccaatcctcaatccttactaaacataagataattcgtactggagaaaaaccctataaatgtgcacactgtggcaaagcctttaaacagtcctcacaccttactagacataagataattcatactgaagagaaaccctacaaatgtgaacaatgtggcaaggtctttaagcagtccccaacccttactaaacatcagataatttatactggagaggaaccatacaaatgtgaggaatgtggcaaagcttttaacc

SEQ ID NO: 1210 - DNA, 2967 bp, Homo sapiens
agtgcggacgtcgccattcctggcccatgggaagattgcgtttcacctgctcctgaaggccgaaggtggctctagcgcatcctttgtcgcgccgtgacctgcaggtactgacagatccgtagggaggacaccgtgacttcccggacgctgggaaatggactcagtctcctttgaggatgtggccgtgaacttcaccctggaggagtgggctttgctggattcttcacagaaaaagctctatgaagatgtgatgcaggagaccttcaaaaacctggtttgtctaggaaaaaagtgggaagaccaggacattgaagatgaccacagaaaccaggggaaaaatcgaagatgtcatatggttgagagactctgtgaaagtagaagaggtagcaaatgtggagaaaccactagccagatgccaaatgttaatatcaacaaggaaacttttactggagcaaaaccacatgaatgcagcttttgtggaagagacttcattcatcattcgtcccttaataggcacatgagatctcacactggacagaaaccaaatgagtatcaggaatatgaaaagcaaccatgtaaatgtaaagcagttgggaaaaccttcagttatcaccactgctttcgcaaacatgaaagaactcacactggagtgaagccctatgaatgtaaacagtgtgggaaagcctttatatattaccagccatttcaaagacatgaaaggactcatgctggacagaaaccctatgaatgtaagcaatgtggaaaaacctttatatattaccagtcttttcaaaaacatgctcatactggaaagaaaccctatgaatgtaaacagtgtgggaaagcctttatatgttaccaatcttttcaaagacacaaaaggactcacactggagagaaaccctatgaatgtaagcaatgtggtaaggctttcagttgtcccacatactttcgaactcatgaaagaactcacactggagaaaaaccctacaaatgtaaagaatgtggtaaagccttcagttttctcagttcttttcgaaggcataaaaggactcatagtggagagaaaccctatgaatgtaaagaatgtggaaaagccttcttttattctgcaagctttcgagcacatgtaataatacacactggggctcgaccttataaatgtaaagaatgtgggaaagccttcaactcttctaattcctgtcgagtgcatgaaagaactcatattggagaaaaaccatatgaatgtaaacgatgtggcaaatcattcagttggtccatttctcttcgattgcatgaaagaactcatactggagagaaaccttatgagtgtaaacagtgtcataaaaccttcagtttttcaagttcccttcgagaacacgaaacaactcacactggagagaaaccctatgaatgtaaacaatgtggtaaaaccttcagtttttcaagttcccttcaaagacatgaaaggactcacaatgcagagaaaccctatgaatgtaaacagtgtgggaaagccttcaggtgttcaagttattttcgaattcatgaaaggtcacacactggagagaaaccctatgaatgtaaacagtgtggaaaagttttcattcgttccagttcctttcgactgcatgaaagaacacacactggagagaaaccctatgaatgtaaactatgcggtaaaaccttcagtttttcaagttcccttcgagaacatgaaaaaattcacactggaaataagccttttgagtgtaagcaatgtggtaaggccttccttcgttccagtcaaattcgattgcatgaaaggactcacactggagagaaaccgtatcaatgtaaacaatgtggaaaagccttcatttcttccagtaaatttcgaatgcatgagagaactcacacgggagagaaaccctatcgatgtaaacaatgtgggaaagccttcagattttcaagttctgttcgaattcatgaaaggtctcacactggagagaaaccttatgaatgcaaacaatgtggaaaagccttcatttcttccagtcactttcgactgcatgaaaggactcatatgggagagaaagtctaagaatataagcaacattctgaagccttcggttgttccagctccttctgaatacacaaaagagttcatactggacagaagctgtgtgaatacaaacattgttctaaagcccttaattgttccagtttcttttgagcacgaaagaattcccactggtgagaaacagtatgaatgtaaacattgtgattaagccttcagttgacctaattcatttcaaagacaggactcgtgctgcagtgaaatctgttttgttttttgttttttgtttttttaaaaaaggccaagcttgttggctcatgcctatagtcccagcactttgggaggccaaggtgcaaggcaggcagatcatttgaggtcagaaattcgagaccagcgtggtcaacatggtgtaaccccatctctactaaaaattaccaaaaaatgaaccaggcatggtagtgcatgcctctaatcccagctactcaggaggctaaggcaggagaatcacttgaacctggagacagaggttgcagtgagctgagatcacgccactgcattccagcctgtgcgacagaatgagacactgtctcaagaaaaaataaaagtgggaaaatcttccaactgtcctctagagtgtgaatatatgaaaggagtcagagtggggtgaaagtctataaatgtaagacatttgggaaagccttcacacagccttttgagcacacatgagaatgtatactggagagaaaccctataaatattaagaatgtgggaaattcttcatcctagttcttttgttgttgttgatgatacaaaaatattttcatttaataaagattgtcaggttatatttaataagaaagaaagtatcatgtaaacagcccagtaataaaattttacaatcttaaaaa

SEQ ID NO: 1211 - DNA, 3067 bp, Homo sapiens
ttgtttctgggaagtgtggtggcctgagttccacgttcttcgtttctccgctagttgtgcgcttggccgcgagacactctggcagttataggaacacaaaggtctgtgtactcttccgcggggggccgcggttatttctgggaaatgtagttgcctaggacccgggttctttgtttctcggctctgggcgtgggaggatagcccctatgctctggcgcaccgggccgcgatggctctgggaattgtagttgtcgcaggccctcgttctttgtctcctggcgttctgggcacggcagcgaggcgctctgggagttccagtaggaacgaaaagcccttgcgcgcagggccgcattggtttctgggaattgtagtttcttgaggccggcggcctggttggggtgacgtcggcgaggcttctgaagacgcaattcctgcgacgcccgcggaggggccctggggggcggcgccgagcgtctggcctgtgttggctgtaggcaacgaaaggagccctcccggtctgcgccggatggccccgggcggtgactcggtccggagccctggaacgctacgcccacctggcggaaagcaccacggaaacgcatccttctgtggccactgttaggtctgccattttacacttttctgatctcctccttcccttctgtgagctatgtctcaggggtcagtgacattcagagatgtggccatagacttctcccaggaggagtggaaatggcttcagcctgctcaaagagatttgtacagatgtgtaatgttggagaactatggccatctggtctcactgggtctttccatttctaagccagatgtggtttccttattggagcaagggaaagaaccctggctggggaaaagggaagtgaaaagagatctgttttcagtttcagagtcaagtggtgagatcaaagacttttcaccaaaaaatgtcatttatgatgactcatcccagtatttgatcatggaaagaattctaagtcaaggccctgtgtattccagttttaaaggaggctggaaatgcaaggatcatactgagatgctgcaagaaaatcagggatgtattaggaaagtaacagtctctcatcaagaagccctggctcaacatatgaatatcagtactgtggagaggccctatggatgccatgaatgtggaaaaacttttggtcgacgcttttccctggtgttacaccagaggactcatactggagagaaaccatatgcatgtaaggaatgtggcaaaacctttagccagatttcaaaccttgtgaaacaccaaatgatacatactggaaagaaaccccatgagtgtaaggactgtaataaaacattcagttacctttcatttcttattgaacaccagagaacgcacactggggagaaaccttatgaatgtactgagtgtggaaaggcctttagccgtgcctccaacctcactcgacatcaaagaattcacataggaaagaaacaatatatatgtaggaaatgtggtaaagcatttagcagtggctcagaactcattcgccaccagattacacatactggagagaaaccttatgaatgcattgaatgtgggaaggcatttcgccgtttctcacaccttactcgacatcagagcatccatacaaccaaaaccccgtatgaatgtaatgaatgtaggaaagctttccgttgtcactcattccttattaaacatcagagaattcatgctggagaaaagctctatgaatgtgatgaatgtggtaaagttttcacttggcatgcatcccttattcaacatacgaagagtcacactggagagaaaccctatgcgtgtgctgaatgtgataaagccttcagccggagcttttccctcattctacatcagagaactcatactggagagaaaccctatgtatgtaaggtatgcaacaaatccttcagctggagctcaaaccttgctaaacatcagaggacacacactcttgacaacccctatgaatatgaaaattcatttaattaccactcattccttactgaacaccagtgaatttacactgcaaagaaaaactatgaatgtatggaattttttaaaaagaagtataatgccttacttcagagaactcttggaaagaagccttatgtgaaagtgatgactgtgaagtaatatggcccacactttattcaccaccctggagaaaaaaaaacccaggaatatgtggaaaagccattaataaccactcttttatttttttgcaataacaaggtgaaatcaatattgttgagaagattcttccatctggtaatgttgagaagacttcatttggtaggagtcccttactttacgtgtgtaaattcctaccaggaaagaatacatatccaatagattggagaaagccagagattagccctcattccgcatctgtcaaccaggacagaaagcatggacaagggatgagctttacaaagatgatgcactttggagatcagaaaattcatatttaagcaaagtgatacaaacacagtgatttgggaatgccttcatttacaatgcaatacttacattttaatactcttgtaggagaaaaagcaactgtataaatgaatgtagagtgactttctgcaatatttcaaacctatatcagagaattacactgtgggaaaactaccattgtaataagtgtagcaaaatctccttagatatctgaaaagtcatactggatggaatctgtaggaaacggttctattttgagggaagggggattcctttttgttttttaagtgaattcagaaaatgttataaataaatcttttggtttattataaaccttctgcttgctgattttttcccacagcatgtgattctgaaaatgtaactacaatattgacataaaaaataaacagtagtttttcttgttgaaacatacaaacataacaaagtgtttttaggtgttttatgattttaactttcagacagagtttggatttaaggtaatgctgacagttatccttgaatctgactatagacatttgttattcagtgtgaaacaaatataagatacatcacagaaaa

SEQ ID NO: 1212 - DNA, 1643 bp, Homo sapiens
ggcgcgggtctttgcgtctggctactaccagaccgcgggttaggggcttcatctctctgcgttctcagttgtgggaggccttggtgattcggccacagcctcagcctccgtcgctctgtgacctgcgggtattggatgattggtagctaagactcccgaatacttcagaagtggggaaatggaactcttaacattcagggatgtggccatagaattctctccagaagagtggaaatgcctggaccctgaccagcagaatttgtatagagatgtgatgttggagaactacaggaacctggtctccctgggtgttgctatctctaacccagacctggtcacctgtctggagcaaagaaaagagccctacaatgtgaagatacataagatcgtagccagacccccagctatgtgttctcatttcacccaagaccattggccagtgcagggcatagaagattcattccacaaacttatactgagaagatatgagaaatgtggacatgataatttacaattaagaaaaggctgtaaaagtttgaatgagtgtaagttgcagaaaggaggttataatgaatttaatgaatgcttgtcaactacccagagcaaaatacttcagtgtaaagcaagtgtcaaagttgttagtaaattttcaaattcaaacaaacgtaagacaagacatactggagagaaacactttaaagaatgtggcaaatcatttcagaagttttcacacctaactcaacataaggtaattcatgctggagagaaaccctacacttgtgaagaatgtggcaaagcctttaaatggtctttaatatttaatgaacataagagaattcatactggagagaaaccttttacttgtgaagaatgtggcagcatctttaccacatcctcacactttgctaagcataaaataattcatactggagaaaaaccctataaatgtgaagaatgtggcaaagcctttaataggttcacaacccttactaaacataagagaattcatgctggagagaaacccatcacatgtgaagaatgtaggaaaatctttacctcatcctcaaactttgccaaacataagcgaattcatactggagagaaaccctacaaatgtgaagaatgtggcaaagcctttaataggtccacaacccttactaaacataagagaattcatactggagagaaaccctacacatgtgaagaatgtggcaaagcttttagacagtcctcaaaactgaatgaacataagaaagttcatactggagagcggccctacaaatgtgatgaatgtggcaaagcctttggacggtccagggtcctgaatgaacataaaaaaattcatactggagagaaaccctacaaatgtgaagaatgtggcaaagcctttagacggtccacagatcggagtcaacataagaaaattcatagtgcagataaaccctacaaatgtaaagaatgtgacaaagcctttaaacaattttcgctcctgagtcaacataagaaaattcatactgtagataaaccctacaaatgtaaagattgtgacaaagcctttaaacggttctcacacctgaataaacataagaaaattcatacttgagagaaatcctacaaatgtaaagaatgtggcaaacctttgg

SEQ ID NO: 1213 - DNA, 6234 bp, Homo sapiens
gagaagcccacgccactctaccccagagctctcgatggtgcttctccggcttcagggctggagtgggggtggagggcgggaaaaaccacagagacaaaacatagagtaccccggcagccggcaagaggaagagagagtggcttccacatccccaatatcctagaggcggctgagccggaggcggtcgcacaaagcgggccccgggggccgttccagccgcggccgaccatagagatgcggctcccgccggctctgggtctggagccttccaggttacaaaccgcctttccagttcgctggctcttatgatccagctcctgcccgacgatgtggacactgtcatcacctccattttacagataggaaagctgaggcccagagaagcgaagcgactgtgtctgtccaagaccacgcgccctcctgcccggaagataagcgtatttcttctctggtgcccacctgtctcctacctcaccctgccctcccgcaggtgaaggttcttaatcttgacggctcagcgtcctccttggctccccccggaggccatgtatggtcaagcttgaagattccccagaacagcgataatattcacatttaagaagccaaaacacacaagtcggtggtgatgacagacccccttttggactcacagccagccagtagcaccggggagatggatggactgtgccctgagctattgctgatccccccgcctctctctaaccgtggaatcctggggcctgtccagagcccctgtccttcccgggaccctgcacctatacctactgagccaggctgcctgctggtagaggccacagcaactgaagagggaccagggaacatggagatcattgtggagacagtagctggaaccctgaccccaggtgctcctggagagaccccagccactgcagcttcataggctccaacgtcaaactcttccggcagcatcagcggagccatggtgctgggacacagggagaactttctgccgttcagggccttccatcccaggagctgctgccagctcccaaactgcctccaggagagagagaaccttcacaggaagcaggtacacccttgcctgggcaggagacagctgaagaggagaatgtagagaaagaagagaagagtgacacccagaaggactcccaaaaggctgtggataaaggccaaggggctcagcggctggaaggggatgtggtctctggcaccgagtccctcttcaagacccatatgtgtccagagtgtaagcgctgctttaagaagcggactcatctggtggagcacctgcatctccacttcccagaccccagcctccagtgccctaactgccagaagttcttcaccagtaagagcaagctcaagacccatctgctgcgggagctgggtgaaaaggcccaccactgcccactgtgccactacagtgcggtggagaggaatgcactcaaccgccacatggccagcatgcatgaagatatttccaacttctactcagacacctatgcctgtcctgtctgccgtgaggaattccgcctcagccaggccctaaaggagcacctcaagagccacacggcagcagccgcagcagagccattaccccttcgctgctttcaggagggctgcagctatgcagcacccgaccgcaaggccttcattaagcacctgaaggagacccatggggtgcgggctgtggagtgccgccatcactcatgtcccatgctctttgccacagccgaagccatggaggcccaccacaagagtcactacgccttccactgcccccactgtgattttgcttgttccaataagcacctattccgtaaacacaagaagcagggccaccctggcagtgaagagctgcgctgcaccttctgcccctttgccaccttcaacccagtggcttaccaggatcatgtaggcaagatgcatgctcatgaaaagatccaccagtgtcctgagtgcaactttgccactgcccacaagagggtgctcatccgacacatgcttctacatacgggtgagaagccccacaagtgtgagctgtgtgacttcacatgccgagacgtgagctacctatccaagcacatgctgacccactccaacaccaaggattacatgtgcactgaatgtggctatgtcaccaagtggaagcactacctccgtgtgcacatgcgaaaacatgcaggggacctcaggtatcagtgcaaccagtgctcctatcgctgtcaccgggctgatcagctgagcagccacaagctgcggcatcagggcaagtctctgatgtgtgaggtgtgtgccttcgcctgcaagcggaagtatgagctgcagaagcacatggcttcccagcaccaccctggcacaccggccccactctacccttgccactactgcagttaccagagccgccacaagcaggctgtgctgagccatgagaactgcaagcatacccgcctccgtgagttccactgtgccctctgtgactaccgcaccttcagcaacaccacactcttgttccataaacgcaaggcccatggctatgtacctggagaccaggcctggcagctccgctatgcaagccaggagccagaaggggccatgcagggcccaacacccccaccagattcagagccctcaaaccagctgtcagcccgacctgaggggccaggtcacgaacctgggactgtggtggaccccagcttggaccaggccctgccagagatgagtgaggaggtcaacactggaagacaggagggcagtgaggctccccatgggggtgacctgggtggcagtcccagcccagcagaggtggaggagggcagctgcacactacacctagaggccctgggagtagagctggagtctgtgactgagccaccccttgaggaggtcactgaaacagcccctatggagttcaggcccctgggactggaagggccagatggactggaaggaccagagctatctagctttgaaggtattgggacttctgacttgagtgctgaagaaaatccccttctggaaaagccagtgtctgagccctccacaaatcctccatccttagaggaggctcctaacaactgggtaggaaccttcaagacaactccacctgctgagacagcacccttgcccccattacctgagtcagagtcattactcaaggccctaaggagacaggacaaagaacaagcagaggcattggtgctagaggggcgggtgcagatggtagtgatccagggagaggggcgagccttccgctgcccacactgcccttttatcactcgccgggagaaggccctgaatctgcactccaggactgggtgccaaggccgccgagagcccctgctgtgccccgagtgtggggctagcttcaagcaacaacgcggcctcagcacccacctgctgaagaagtgccctgttctactcagaaagaacaagggcttgcccagaccagattcacccatccctctgcaacctgtgctcccaggtacccaggcctcagaggacacagaaagtgggaagcccccacctgcatcacaagaagcagagctactgcttccaaaagatgctcctttggagcttcccagggagccagaagaaacagaagagcctcttgccacagtctctggttccccagtccctcctgcaggaaactccttgcccacagaggcccctaagaagcactgctttgacccagtccctcctgcaggaaactcctcacccacggaggcccctaagaagcaccaccttgacccagtccctcctgcaggaaactcctcacccacagaggccctgaagaagcaccgctttgagcagggcaagtttcactgcaactcctgcccattcctttgttcccggctctcctctattacctctcacgtggctgaaggctgcagggggggacgtggcgggggaggaaaacgagggaccccccagacccagcctgatgtgtccccgttgagcaatggggactctgctcccccgaagaatgggagtacagagtccagctctggtgatggggatacagttctggttcaaaagcagaagggggctcgcttctcctgccctacatgtccctttagctgccagcaggaacgggctctgaggactcaccagatccggggctgccccctcgaggagtctggagagctgcactgcagcctctgcccattcactgctcctgctgccactgccttaaggctccaccagaagcggaggcaccccactgcagccccagcccgtgggccccggccccatctacagtgtggggactgtggcttcacctgtaaacagagccgttgcatgcagcagcaccggcggctcaagcacgagggggtgaagccccatcagtgccccttctgtgacttttcgaccaccagacggtaccggttagaggctcaccagtcccgacacacaggcattggccgcatcccctgcagctcttgcccccagacgtttggtaccaactcgaaactgcgcttgcaccggttaagggtacatgacaaaacacctacccacttctgtccactttgtgactatagtggctaccttcgccatgacatcactcgtcatgtcaacagctgccaccaaggcaccccagcctttgcctgctcccagtgtgaagcccagttcagctcagagacagcacttaagcagcatgctctgcgccgacaccccgagcctgcacagcctgcccctggctctcctgcagagaccactgagggccccctgcactgttcccgctgtgggttgctgtgccccagccctgccagcttacgaggacacacccgtaaacagcacccacggcttgagtgtggggcctgccaggaggccttccctagccgactggctctggatgagcaccggaggcagcagcatttcagccaccgctgtcagctctgtgactttgctgcccgggagcgggtgggcctggtaaagcactacctggaacagcatgaggagacttcagcagccgtggcagcctcagatggggatggggatgctggccagcccccgctacactgccccttttgtgacttcacatgccgccatcagctggtactagatcaccatgtgaaagggcatgggggcactcgtctctacaagtgcaccgattgtgcttacagcaccaagaaccgacagaagatcacctggcacagccgcatccacactggggaaaagccttaccactgtcacctctgcccctatgcctgtgctgatccctctcgtctcaagtaccacatgcggatccacaaggaggaacggaagtacctgtgccctgagtgtggctacaagtgcaagtgggtcaaccagctgaaataccacatgaccaagcatacaggactgaagccataccagtgtcccgagtgtgagtactgcaccaaccgggctgatgcactgcgtgtgcaccaggagacccggcatcgagaagcacgggctttcatgtgtgagcagtgtggcaaggccttcaagacgcgcttcctgctgcgcacccaccttcgcaagcacagtgaggccaaaccctatgtgtgcaatgtgtgccaccgtgctttccgctgggctgctggcctgcgccatcatgccctcacccacaccgaccgccaccccttcttttgccgcctctgcaactacaaggccaagcaaaagttccaggtggtcaagcacgtacgcaggcaccaccctgaccaagccgacccaaaccagggtgtgggcaaagaccccaccacccccacagtgcacctgcatgatgtgcagctggaggatcccagccctcctgctcctgccgctccccacactggacctgagggctgaaagcctgccccacctcctgtataggaagagggtatggtctgagatgtgcagactgggaccagcgctagcctgaggagctcagagcctaaggaaagactggcttttggggtacaagggtgactagaaccttcctgggactctggctatagtactttgaaattatcacccatataaaagagggacatggactataacgttgatttcttattgctgtacattgcgtttttaacctgcaagttctcagtttcttcaccatcactccatcaaagtccctggctataagatctggattttacccactccatcttctctttccttcttactgtgtcaattcctattttctttcagaatcttctaaaaacagttgtatctaaccgcatgtgctgttgtgcctaatgctctataaagcatgttaaacagaaa

SEQ ID NO: 1214 - DNA, 2955 bp, Homo sapiens
gggcgggcctcagacacactatgcgggttgcggggcctgggggccggacggctgtttcctgtcctggtgcatggtggtcggacgaaggaattgttggaaaattttctcggaggtagaagatgttgttagcccaaataaatcgagattctcagggaatgacagagtttcctggaggagggatggaggcgcaacatgttacgctgtgcttgacagaggcagtcaccgtggcagatggtgacaacttagaaaatatggaaggcgtaagcttgcaagcagtaacacttgcagatggttctactgcttacatacaacacaattctaaagatgcaaaactcatagatggccaggtcattcagttggaagatggttctgcggcctatgttcaacatgtacccatacctaaaagtacaggggacagtttgcgtctagaggatggtcaagcagtacagttagaagatggtaccacagcatttattcaccacacctccaaagatagttatgaccagagtgcattacaggcggttcagctggaagatggtaccacagcttatatccaccatgcagtgcaagtcccgcagtctgacaccatcttggcaattcaggctgatgggacagtggcaggtctgcacactggggatgctacaattgaccctgacaccatcagtgctttggaacagtatgcagcaaaggtgtccattgatggaagtgaaagtgtagcaggtactggaatgattggagaaaatgagcaagagaaaaaaatgcagattgttttacaaggacatgctacaagagtaactgctaaatctcaacagagtggagagaaggcatttcgatgtgaatatgatggatgtggaaaattatatacaacagctcatcatctcaaggtccatgagaggtcacacacaggagatcggccttatcagtgtgagcatgcaggctgtgggaaggcatttgcaacaggttatggattaaaaagtcacgtcagaactcatacaggagaaaagccatatcggtgttcggaagataattgtactaaatctttcaaaacttcaggagatctacagaaacacatcagaactcatacaggagaaaggccctttaagtgtcccttcgaaggctgcggtcggtcctttacaacatcaaatatcagaaaagtgcacgttaggacacacacaggagaaagaccttattactgcacagagccaggatgtgggagggcatttgccagtgcaacaaattataaaaaccatgtgaggatacacacaggagaaaagccatatgtttgtacagttcctgggtgtgacaaaaggtttacagaatattccagtttgtacaaacatcatgttgtccacactcattccaaaccttacaactgtaaccactgtgggaagacatacaagcagatctccacgctggccatgcacaaacggacagcccacaacgacactgagcccatcgaggaggagcaggaagccttctttgagccgcccccaggtcaaggtgaagatgttcttaaagggtcccagattacgtatgttacaggtgtagaaggggacgacgttgtttctacacaagtagccacagtaacccaatctggactgagtcaacaagttacactcatatcccaggatgggactcagcatgtcaacatatctcaagctgacatgcaggccattggcaacaccatcacaatggtaacgcaggatggcacgcccatcacagtccccgcccatgatgcagtcatctcctcagcaggaacgcactctgttgctatggttactgctgagggtacagaaggggaacaggttgcaattgtagctcaagacttggcagcattccatactgcctcatcagaaatggggcaccagcagcatagccatcacttagtaaccacagaaaccagacctctgaccttagtagcaacatccaatggcacccagattgcagttcagcttggagaacagccatctctggaagaagccatcagaatagcgtctagaatccaacaaggagaaacgccagggttggatgattaatcctcagaacaatggagcaataaagcagaaggagtctttcatcttctggcagcagaaatccatgaagcccgggcccaggaaaattagaagttttccattcctgatacactgtacacatttttatgcgagagtggagaacattttattcttgacacttttgtgtatataacccttggaatagattctcagagtgattcattgtgtacaaggaagtatgaaattagggcaatacagtaaattttcatgttactcttttatcagatcacaaactcctagagtctacatgcaagactagtaaagtcttatggagtcttatgatggatttttaacttcccgtggaaaaaaaaataaaggctgtatctaaaatatcaaaggttctatatgtcacacaatcgtaattccaaaagccattatggataataaagggtgtaaagccttcagatatttccccagttagtagagtgtctgcggtttttgttctactatatgcttgtccatttttatttgtatctcatggtttgcagactgtttgaataatttatagtttcccatccctgttaaaaaccagctcttcaagctgaaatgctaattatattggcattacattgaattatgtacaaaattataaaatttggttatttaaaattaaaaagttaaatccagtggttttgttaaagattttgcttagtattcaatttttattactgttttttaaaaataatgaatcatcaaagtttaaccacaggctggtgcccgggataacagtactgtaattggaaatggctttactctgaaaattaggttagtgggttggtgtaaattatttatttttgcttatgtacttttgttttaaagcttatttaccccaaagtttattattaattttgaatacagcaatttttaaaatgttaaaaaaaaa

SEQ ID NO: 1215 - DNA, 2622 bp, Homo sapiens
tctcccctcccgccgcccgggcgagcgacacggctgcggcccccctcccctcccttccctccctccctcccatccccccctccccgagacccaccggaccccgaacccagatggccgaaacgggctccccgtcttaacgatttggcgtctccctcgaccaccacctctttgtgcagcagcccccgggcagaccctgttccgagggcaacgctccccagtccccccacccccgaccccggaatcatgcatcggactacacggatcaaaatcacagagctgaacccccacctcatgtgtgccctctgcggggggtacttcatcgacgccaccactatcgtggagtgcctgcattccttctgcaaaacctgcatcgtgcgctacctggagaccaacaaatactgccccatgtgtgacgtgcaggtccataaaacccggccgctgctgagcatcaggtctgacaaaacacttcaagacattgtctacaaattggtccctgggctttttaaagatgagatgaaacggcggcgggatttctatgcagcgtaccccctgacggaggtccccaacggctccaatgaggaccgcggcgaggtcttggagcaggagaagggggctctgagtgatgatgagattgtcagcctctccatcgaattctacgaaggtgccagggaccgggacgagaagaagggccccctggagaatggggatggggacaaagagaaaacaggggtgcgcttcctgcgatgcccagcagccatgaccgtcatgcatcttgccaagtttctccgcaacaagatggatgtgcccagcaagtacaaggtggaggttctgtacgaggacgagccactgaaggaatactacaccctcatggacatcgcctacatctacccctggcggcggaacgggcctctccccctcaagtaccgtgtccagccagcctgcaagcggctcaccctagccacggtgcccaccccctccgagggcaccaacaccagcggggcgtccgagtgtgagtcagtcagcgacaaggctcccagccctgccaccctgccagccacctcctcctccctgcccagcccagccaccccatcccatggctctcccagttcccatgggcctccagccacccaccctacctcccccactcccccttcgacagccagtggggccaccacagctgccaacgggggtagcttgaactgcctgcagacaccatcctccaccagcagggggcgcaagatgactgtcaacggcgctcccgtgccccccttaacttgaggccagggaccctctcccttcttccagccaagcctctccactccttccactttttctgggcccttttttccacctcttctactttccccagctcttcccaccttgggggtggggggcgggttttataaataaatatatatatatatgtacataggaaaaaccaaatatacatacttattttctatggaccaaccagattaatttaaatgccacaggaaacaaactttatgtgtgtgtgtatgtgtggaaaatggtgttcattttttttggggggggtcttgtgtaatttgctgtttttgggggtgcctggagatgaactggatgggccactggagtctcaataaagctctgcaccatcctcgctgtttcccaaggcaggtggtgtgttgggggccccttcagacccaaagctttaggcatgattccaactggctgcatataggagtcagttagaatcgtttctttctctccccgtttctctccccatcttggctgctgtcctgcctctgaccagtggccgccccccacgttgttgaatgtccagaaattgctaagaacagtgccttttacaaatgcagtttatccctggttctgaggagcaagtgcagggtggaggtggcacctgcatcacctcctcctcttgcagtggaaactttgtgcaaagaatagatagttctgcctctttttttttttttcctgtgtgtgtggcctttgcatcatttatcttgtggaaaagaagattcaggccctgagaggtctcagctcttggaggagggctaaggctttagcattgtgaagcgctgcacccccaccaaccttaccctcaccggggaaccctcactagcaggactggtggtggagtctcacctggggcctagagtggaagtgggggtgggttaacctcacacaagcacagatcccagactttgccagaggcaaacagccttccaattgcccctccacccccagctgaggcccggtcacctggtcaggacagagcaactgcatctaaaagcacaagaagacagaaacctgtaagctctgaccccacccccaccccttgagaggtcagcggaccacctccttagggacagaccctggcaggtcgctgcccaccgagatttcctcaagtgtgcatagatctgagaggagtcgggagtcgagactcgagattccatcatagcgtaggtgtgtggggttgggagccccctgatgggcttgtctgtgtttgcaccttgtcctgtgtctgaggtcctgtgactgtaccctcctttgccctgggacatctgtatctcttggctttgtaataaatgctgcatactttctaaaaaaaaaaaaaaaaaa

SEQ ID NO: 1216 - DNA, 2417 bp, Homo sapiens
gcagcagagaggagttgagggcgatgagagcgggtactgcgaactgccgggcgatgctgtcgctgccgccgtgatacggagagcaacagttccccagcaacacccctccccgacacaggcacacaccccccgacaggcacgcacacccaccccacagtgcccggctcggctgcgcctcctctattggcccaggaagcccacccagccccgccacgcagagcccagaaggaaagaaagcctcatgcctgagccgaggggagcaccatggatctgacaaaaatgggcatgatccagctgcagaaccctagccaccccacggggctactgtgcaaggccaaccagatgcggctggccgggactttgtgcgatgtggtcatcatggtggacagccaggagttccacgcccaccggacggtgctggcctgcaccagcaagatgtttgagatcctcttccaccgcaatagtcaacactatactttggacttcctctcgccaaagaccttccagcagattctggagtatgcatatacagccacgctgcaagccaaggcggaggacctggatgacctgctgtatgcggccgagatcctggagatcgagtacctggaggaacagtgcctgaagatgctggagaccatccaggcctcagacgacaatgacacggaggccaccatggccgatggcggggccgaggaagaagaggaccgcaaggctcggtacctcaagaacatcttcatctcgaagcattccagcgaggagagtgggtatgccagtgtggctggacagagcctccctgggcccatggtggaccagagcccttcagtctccacttcatttggtctttcagccatgagtcccaccaaggctgcagtggacagtttgatgaccataggacagtctctcctgcagggaactcttcagccacctgcagggcccgaggagccaactctggctgggggtgggcggcaccctggggtggctgaggtgaagacggagatgatgcaggtggatgaggtgcccagccaggacagccctggggcagccgagtccagcatctcaggagggatgggggacaaggttgaggaaagaggcaaagaggggcctgggaccccgactcgaagcagcgtcatcaccagtgctagggagctacactatgggcgagaggagagtgccgagcaggtgccacccccagctgaggctggccaggcccccactggccgacctgagcacccagcacccccgcctgagaagcatctgggcatctactccgtgttgcccaaccacaaggctgacgctgtattgagcatgccgtcttccgtgacctctggcctccacgtgcagcctgccctggctgtctccatggacttcagcacctatggggggctgctgccccagggcttcatccagagggagctgttcagcaagctgggggagctggctgtgggcatgaagtcagagagccggaccatcggagagcagtgcagcgtgtgtggggtcgagcttcctgataacgaggctgtggagcagcacaggaagctgcacagtgggatgaagacgtacgggtgcgagctctgcgggaagcggttcctggatagtttgcggctgagaatgcacttactggctcattcagcgggtgccaaagcctttgtctgtgatcagtgcggtgcacagttttcgaaggaggatgccctggagacacacaggcagacccatactggcactgacatggccgtcttctgtctgctgtgtgggaagcgcttccaggcgcagagcgcactgcagcagcacatggaggtccacgcgggcgtgcgcagctacatctgcagtgagtgcaaccgcaccttccccagccacacggctctcaaacgccacctgcgctcacatacaggcgaccacccctacgagtgtgagttctgtggcagctgcttccgggatgagagcacactcaagagccacaaacgcatccacacgggtgagaaaccctacgagtgcaatggctgtggcaagaagttcagcctcaagcatcagctggagacgcactatagggtgcacacaggtgagaagccctttgagtgtaagctctgccaccagcgctcccgggactactcggccatgatcaagcacctgagaacgcacaacggcgcctcgccctaccagtgcaccatctgcacagagtactgccccagcctctcctccatgcagaagcacatgaagggccacaagcccgaggagatcccgcccgactggaggatagagaagacgtacctctacctgtgctatgtgtgaagggaggcccgcggcggtggagccgagcggggagccaggaaagaagagttggagtgagatgaaggaaggactatgacaaataaaaaaggaaaagaaaaaaaaaaacagaaggaaaaggaaaaaaaaaaaaa

SEQ ID NO: 1217 - DNA, 3880 bp, Homo sapiens
aggactcccagacccctcaccttctgcctcccctggtcgcgtccgggtccttgcggagctaactagctcgccacgacgtcaagaacgacgtaacgtcaggccgctgtgggctctgggaattgtagtccagagctagatcggccacggacagaatggcgttctcttatctctgagtcggggcctggctcgttttgacatttttgcgcccacgagtcttcggagagggcgtcgccactccagaccttccagcaagcttgaagtcatctgacgctaaaggactacttacctcaagagctccatcgtcacagaaggaggcggccaagttcgcggggggaggggaggagacagagagtcgaccagtaaagcctcaagggaaatgtagtccaaggcctgagaagcgacgttgctggtaatagaaggtaattcagtaccagcctgggcctggccgcggtgaccgaggcgggccgcgtcgcggagacttctgggagtgcttcctcgctctccgagtgcgcaagcgcagcgcaccgagtggacattttggtctttgtccgcgggtcagtacggcccctgggtccacgtggcgcgaaagtaggaggaagacataggccaaggagccagacttcctgtgttaactccttcctctgccactttttaccttggggacctcagttaatatgatcctctgttgaagcaagaagacaaactgtatggtggagaaagaagtgggaaggatctgcgcggaagaagcctgagaagatgatgcacagatagagaggcaccaggacttgagaggcaccaggacttgggaggcatgttgatccatctccaggaaagactgagaaaaagagcgttgaatataagaaaaaatacttcctctgttctcagatcgtatttgttttaaggccacacctttttgaagttttcagtttgaaacacaacctggactgaaatcatgagggaggttgtgtaggaaagaatcatcaagggacttagttgggagcttctctaccacagcttactccttatggtattaaccccctttaagtgtaaatgtctttggtttaaaacgtttgtacctcatctgttaccagagtgttcatactggagagaaaccctatgaatttactgaatgtgggggaactgttactcatatgttgcatttcgtcgaacgtgcaagtcatgctgaagagaaaccctgtgcttctaaggagtattgacaagcccttagctagatgacaatctcattgagaagcagaaaattcatgctggagagaaactagtgaaggtagcaatacttcattgaatattagaaaatttttctagagagaaagcattgaatatactgagtatgataacatttcctctcaaaccttatcccttactctgcatttgggagatcatacacagagaagccttataaatgtaagagatgtggaaatatcttcagccaaaagtaaatcctcactcatcaagaaatttttactggagagaaaccttgtgaatgtgggaaagcttccattcagatgtcacacctcagccagcagagaatttacagtggggaaaacccctttgcctgtaaggtatgtggaaaagtcttcagccacaaatcaaacctcactgagcatgagcattttcacacgagagagaaaccttttgaatgtaacgagtgtggaaaagcctttagccaaaagcagtatgtcattaaacatcagaacacccatactggcgagaagcttttcgaatgtaatgaatgtggaaaatcatttagccagaaggaaaacctccttacgcaccagaaaattcacactggagaaaaaccttttgagtgtaaagattgcgggaaagctttcattcagaagtcaaacctcatcagacaccagagaactcacacaggagagaagccctttgtatgtaaggagtgtggaaaaaccttcagtggcaaatccaaccttactgagcatgagaaaatccatattggagagaagccttttaaatgtagtgaatgtggaacagcctttggccagaagaagtacctcataaaacatcagaacattcacactggagagaaaccctatgaatgtaacgaatgtggaaaagccttctctcagcgaacatcacttattgtacatgtgaggattcattcaggtgataaaccttacgaatgcaatgtttgtggaaaagccttctctcagagctcatctctcactgtgcatgtgagaagccatacaggggagaagccctatggttgtaatgaatgtgggaaagctttctctcagttctcaacccttgctctgcatttgagaatacacacaggtaagaagccttatcagtgcagtgaatgtgggaaagctttcagccagaagtcacaccacattagacaccagaaaattcatactcactaaaaaccccatgaaagccttgaaagtgggaaagctttcattagaaatttgcacctcatcatgccccagaaataatccttctgaagcaaagcaccacgaatgaggttaactttaacaagtactaaaaacttaagggacaccagaaaatttgtactgaagagaaagacatgcatatgattaaaaccctgtgtccaacagagaaacctgcagcagagataatggtgaaagtttaggcacattttcactaaaagtgggaacagaaaatggaggcctgttttttattgctaccaccatagatctggagatcttcgccagtaacaagaaaaattaagttgtaaatattggaaaggaacagacaaaaatagatgacatggtcatctacaactaatattaagactcctgtggtattgattgagcagagcagaagagatttcaaaaaaagacctatgcatttattagaatttggaatatgatacaagtggcatcaggaaatgaggaaataatggaactattttttttaagtggaggtagtttgttctccaagggggaaaaatagaccatgaactatacacaaaagtgaatccagagattaaaaacagaaatatggaaaagctatgtactaaaatgcatatgaccttgggaatagggaaacattccttggaacaatttgagaaatacttagcggttctacttatgagtatgaatgctcaggaaatacgcactaggatatttactgtggcttgatttgtagtagccaaaaattagaaacaactgagaaagcccatcacgaacaatatgggaaattcttatgtaatactatatatctgtaaaatgcaacaaatgaaatccacatgtattaacagaaagatcccagaattgttgaggggggatcaagttgcagaatgatacagatagtacaatgacttttttgtaaatttgaattaaaagtttcctcataaaactcagtactatctattggtaatggatgcatatatgtatgtacatgtttttgaaacggattggaaggatacagaccaaactcttgatagtggtcacctgtgaagagtggagaagggaaaataatgagtgtgggaggtgggatgggtattggttaaaggggacttcagctttttatataaacatccacttctctttcaaaagacttcaagtaaatataagaagatactgattgattctggattgtggtatagggatatcttgtcttattttttgtacttttctgtatttttaaaatttctcaaaataggaatgggagtgaggatgggaatgctgtatctgtggaagtcatgttatactggattcatttccaattaaatactaaacattttatagaaaatatttctaaaattttatcacggatgaatggatggacttgctctctatgtaatatgaaattaatctattttattaaaatttaaaaggacagcacaatccaaaaaaaaaaaaaaaaaaaaaaaaaa

SEQ ID NO: 1218 - DNA, 5744 bp, Homo sapiens
gtttcctcggcggcctcggagcgcgggtgcagcagttgtgtcccgacccctgggagcgccatggcagagctgtgccccctggccgaggagctgtcgtgctccatctgcctggagcccttcaaggagccggtcaccactccgtgcggccacaacttctgcgggtcgtgcctgaatgagacgtgggcagtccagggctcgccatacctgtgcccgcagtgccgcgccgtctaccaggcgcgaccgcagctgcacaagaacacggtgctgtgcaacgtggtggagcagttcctgcaggccgacctggcccgggagccacccgccgacgtctggacgccgcccgcccgcgcctctgcacccagcccgaatgcccaggtggcctgcgaccactgcctgaaggaggccgccgtgaagacgtgcttggtgtgcatggcctccttctgtcaggagcacctgcagccgcacttcgacagccccgccttccaggaccacccgctgcagccgcccgttcgcgacctgttgcgccgcaaatgttcccagcacaatcggctgcgggaatttttctgccccgagcacagcgagtgcatctgccacatctgcctggtggagcataagacctgctctcccgcgtccctgagccaggccagcgccgacctggaggccaccctgaggcacaaactaactgtcatgtacagtcagatcaacggggcgtcgagagcactggatgatgtgagaaacaggcagcaggatgtgcggatgactgcaaacagaaaggtggagcagctacaacaagaatacacggaaatgaaggctctcttggacgcctcagagaccacctcgacaaggaagataaaggaagaggagaagagggtcaacagcaagtttgacaccatttatcagattctcctcaagaagaagagtgagatccagaccttgaaggaggagattgaacagagcctgaccaagagggatgagttcgagtttctggagaaagcatcaaaactgcgaggaatctcaacaaagccagtctacatccccgaggtggaactgaaccacaagctgataaaaggcatccaccagagcaccatagacctcaaaaacgagctgaagcagtgcatcgggcggctccaggagcccacccccagttcaggtgaccctggagagcatgacccagcgtccacacacaaatccacacgccctgtgaagaaggtctccaaagaggaaaagaaatccaagaaacctccccctgtccctgccttacccagcaagcttcccacgtttggagccccggaacagttagtggatttaaaacaagctggcttggaggctgcagccaaagccaccagctcacatccgaactcaacatctctcaaggccaaggtgctggagaccttcctggccaagtccagacctgagctcctggagtattacattaaagtcatcctggactacaacaccgcccacaacaaagtggctctgtcagagtgctatacagtagcttctgtggctgagatgcctcagaactaccggccgcatccccagaggttcacatactgctctcaggtgctgggcctgcactgctacaagaaggggatccactactgggaggtggagctgcagaagaacaacttctgtggggtaggcatctgctacggaagcatgaaccggcagggcccagaaagcaggctcggccgcaacagcgcctcctggtgcgtggagtggttcaacaccaagatctctgcctggcacaataacgtggagaaaaccctgccctccaccaaggccacgcgggtgggcgtgcttctcaactgtgaccacggctttgtcatcttcttcgctgttgccgacaaggtccacctgatgtataagttcagggtggactttactgaggctttgtacccggctttctgggtattttctgctggtgccacactctccatctgctcccccaagtaggcaggctgtaggcacttgggctgactgcctgcagaagtcccaagaccctagtgaaaatacagcaggcagaactctccttggataattccccaagaggtcccaaggattgggagcatgggaggggagctggcgggagggtgggaggtgggatttagccaggaaaggggtgagagtgattgtgttgtgggcgaggaggcgtttccaccccctggtgcctatcagggcagggtgacctactccccattgttctggaaatctccaggctgctgggcagctgggcagagctctgggaagtgaagtcatgagtgcccgattcctcttagagaaaatccatagctactgtaggttctgtcttgggccacttggatctgaaggctgcccctttgctctctggggtagccttcagatcttggtgttttgaattcttactatagatgtttttaaagttccaaagtcattgagtttcaatgttacataaactccattacccgcatgttggggcttgatctcctggttattatctgtgcttgaggaaacacccacagcagtctctacccagaacagtttcctaaagaggcataccctcttcctccactggaaaatagtgcgttcccttcctaccctgcacacccatcgcccccacattgatggttttcaaacagcaaacttttcagctaaagcttcaaaccatgattggaatcagcctgtgttggatttgtgattcagggtcatggtgaccctgatccagtttgggtggaaatccttcctaagtatcataagaagcatcttggcagagatgctttggtggcagccatgagctttgctggaggccttgcttcccatagccttggctgtggggcaaggaactctgccaggcgagggggatgctgccctggatcaacagaagcctggtgggtttgctcgtgttagagtgtcctgccttcttactgacaactcttctcggtgatagcctctcttccctggattgtgacatatggaatgacagtgcaggtaccaccgaggctagcacagtcaagcctccagctaagctggatccctgaagcctgctatcatgcagacaggctatgcggctgcctcggaccatgctaggccacttgctggggtgtcaacctaccaccaaaggggtcttttagcaaacctcatggggaacaggaacattcctgttcatccctggccacaggctgcagacccagcactggcccttgcgtgagtcagagcctggggctggccctagccccttctactgacttcctcatttaagccaattatataagctcacattgatcagggagggagggaaagagctaaagagggtcacacaagtggctattttccctgcagtgtttctgtgtggtgaaaataacccagtccactaaggggcgggagtgaatggatggctggattttccccaagctccttatagcctaatgttgtcaggatgtgagtatgaggaatttagcctcttatagtgaaatgagtccaactctgggctttgcttagaggagagctcctgtcaggcttcctataatatgaaaagaagtcaccattggggaactagagaccccagaccttttcatatggatatttgagaatgtaatgcatctcaggcctcgtgctggaactctagggcactctaggcaggctcagaacacttgatattcctgacagctacacacctgacatgcaggtacatacctgatcggtgtcatctcctaacaaggattttcagttcctcgggagagcaataatctttgtaggaaagacatccctgcaataggtgatatgtggtccttagaagttttattcctttactacttggaagaaaagttctttggtgattcttctctgcttttgaagatgatcaaaagcatcttcattgattttctgaaacgaaagccttgtctgaaaccaattaatacttgggaaacagctgggcttggaggagtagaatgccagagataaatccatggctcctgctctggctctcttctgcagaaatgagggcaacagtgaggccacttccctggcaaatgtgcagctcaggatagggaagcataagaccctctgtttaaaagagagtcaagtaggtaaccaaagccaagctctgtgcaaggtgctttggagttgtaaattgaggagtgcatccttgctgtcttgaaccattctgtttgcaatggtgagaccttacataacctagccttgcagggccgccacacaaccctggagtcctagagttggaggaacctttgtatccatctgacttctcattttgcagaatatgatgagaaagtagaggatcgctctgttcaccactcttgctattccattagtggggagatgcctgctagcatgtgtgaggggaacactctgatacactgggaagtatcggaaattcccagaaacacaaacataaaataactctcctagacccaggtactggggactgtctcagtccgtgtggcatgataaataaaaggttaggatcaagtctttgtatttttcaagatgtggtagctgattattcctgttttaagtactctgaaattgatctgtgatcaataatactaatatgttatcttttaccgtattctgcctctcactattgattttaattagttaggagtatttgagctgttatttcttgagcttaatatttttttagagttaactctttaaggagataatcatggctgtagacaaggccagggctggctgacgtgccttagaaggtttgaatgcaataaagcggtgtttggcgttctcctgcattgtagtgcgggtacaaaatgctatttgttcgtcatactgttgtcagcagatgagccgcccactacagacggctactgcccagggacctgcccaggccccacccaagggctcccaagggttgagatttctgcagacctatagccagcacacttagtcctgccctatatagagttcctcttcgggaagcttttgataaggaattctcagaccgataggatgtctgtctgggctttgctgcgggacagtctaactgtgggggctaggggaaagcaggagagtatcgatcaaagagtaagccacacacggataatcagttactagggatggaggtgtgagggttcattatattattcattttactgttgtatatgtttgaaaatgtctataataaaaagctttaaaaaaaaaaaagaaacaaaaatagttcaggccagcaatgggccctccatgttcagtggattttatccttgtttcaattggggtaggagttccaggaggtgtggattggaggttgtctaaagaattgaactggcctttgtccctgcttcctgggagggagactttcagtccttgacatttccagggtaataggagtgtctttgttatttgtgaggccatgggatcacacctgagcttatgctaaaaggtgggatgactcagagctggggctggtcaccagacagactgaccatgtgattagaggtttgaggctttgagtcagcctgacctatggggcgggggactggaggctgagtttaatcatctggccagtgctttaatcagtacatcatgaaaccctaataaaaactctggacactaaagctcagcatagcttcctgggtggtgaagctgtggctatgccggcagggcagtgtgccctaattccacgaagagggggcatgggagcactgtgctcaagacccttccagacctttccctgtgtcttccttggcttgtggagctgatttgtatcctttataataaaactaatcataagtata

SEQ ID NO: 1219 - DNA, 9573 bp, Homo sapiens
ggcgaccgcggcggcgctctagctgcggcatgtctgcgtctctactgctctgggaggaggaagagaaggaggaagaggaggaggaggaggagggggaggaagaggagaaaggcgcaggggtgggagctgttgccgaagctgccacagcaaaagttctcccccctccccccttcccctcctctcaaggcccctagaaaggttggagctgccgccgcctgcagtcggtgaccgcgcgactcggcgcccgcccgcggatagagggaggaatcagcagcttggaaattcaagcacgtgatctggcgggatgggcgtttgcctaacgtatttaatggaggaatcggatggcataagtgattaaggtggtattgaggatttctgaagcctatgaaaggtagaaactcaaccatgatttctttttcaactctacagcattcctttccttgaagtcttcgtttttaccttagtctcgggcagttatacttaagcatgaacattgacgacaaactggaaggattgtttcttaaatgtggcggcatagacgaaatgcagtcttccaggacaatggttgtaatgggtggagtgtctggccagtctactgtgtctggagagctacaggattcagtacttcaagatcgaagtatgcctcaccaggagatccttgctgcagatgaagtgttacaagaaagtgaaatgagacaacaggatatgatatcacatgatgaactcatggtccatgaggagacagtgaaaaatgatgaagagcagatggaaacacatgaaagacttcctcaaggactacagtatgcacttaatgtccctataagcgtaaagcaggaaattacttttactgatgtatctgagcaactgatgagagacaaaaaacaaatcagagagccagtagacttacagaaaaagaagaagcggaaacaacgttctcccgcaaaaatccttacaataaatgaggatggatcacttggtttgaaaacccctaaatctcacgtttgtgagcactgcaatgctgcctttagaacgaactatcacttacagagacatgtcttcattcatacaggtgaaaaaccatttcaatgtagtcaatgtgacatgcgtttcatacagaagtacctgcttcagagacatgagaagattcatactggtgaaaaaccatttcgctgtgatgaatgtggtatgagattcatacaaaaatatcatatggaaaggcataagagaactcatagtggagaaaaaccttaccagtgtgaatactgtttacagtatttttccagaacagatcgtgtattgaaacataaacgtatgtgccatgaaaatcatgacaaaaaactaaatagatgtgccatcaaaggtggccttctgacatctgaggaagattctggcttttctacatcaccaaaagacaactcactgccaaaaaagaaaaggcagaaaacggagaaaaaatcatctggaatggacaaagagagtgctttggacaaatctgacctgaaaaaagacaaaaatgattacttgcctctttattcttcaagtactaaagtaaaagatgagtatatggttgcagaatatgctgttgaaatgccacattcgtcagttgggggctcgcatttagaagatgcgtcaggagaaatacacccacctaagttagttctcaaaaaaattaatagtaagagaagtctgaaacagccactggagcaaaatcaaacaatttcacctttatccacatatgaagagagcaaagtttcaaagtatgcttttgaacttgtggataaacaggctttactggactcagaaggcaatgctgacattgatcaggttgataatttgcaggaggggcccagtaaacctgtgcatagtagtactaattatgatgatgccatgcagtttttgaagaagaagcggtatcttcaagcagcaagtaacaacagcagggaatatgcgctgaatgtgggtaccatagcttctcagccttctgtaacacaagcagctgtggcaagtgtcattgatgaaagtaccacggcatccatattagagtcacaggcactgaatgtggagattaagagtaatcatgacaaaaatgttattccagatgaggtactgcagactctgttggatcattattcccacaaagctaatggacagcatgagatatccttcagtgttgcagatactgaagtgacttctagcatatcaataaattcttcagaagtaccagaggtcaccccgtcagagaatgttggatcaagctcccaagcatcctcatcagataaagccaacatgttgcaggaatactccaagtttctgcagcaggctttggacagaactagccaaaatgatgcctatttgaatagcccgagccttaactttgtgactgataaccagaccctcccaaatcagccagcattctcttccatagacaagcaggtctatgccaccatgcccatcaatagctttcgatcaggaatgaattctccactaagaacaactccagataagtcccactttggactaatagttggtgattcacagcactcatttcccttttcaggtgatgagacaaaccatgcttctgccacatcaacacaggactttctggatcaagtgacttctcagaagaaagctgaggcccagcctgtccaccaagcttaccaaatgagctcctttgaacagcccttccgtgctccctatcatggatcaagagctggaatagctactcaatttagcactgccaatggacaggtgaaccttcggggaccagggacaagtgctgaattttcagaatttcccttggtgaatgtaaatgataatagagctgggatgacatcttcacctgatgccacaactggccagacttttggctaaaaaaaaaaaaaaagtgtaaataatactggcactttagaacagattaatcaagagtggggttactctgtgtaaatggagtgctgtacagatttaagagcaatgcgtaataacaagttaagctgatatgaatagcaagataatccaataactgcatttcgtttggttagtcagcattctttgaactgccttacatgttgtcacctttatagaagcaatgcattacttgttttagatcagaaacttgctattccacccacaccaagttaaaaaggaaaaaaaaaagactttcgcacaattgtttcctaactgataacattgtacattcttaggagattagtaattgtgtgaaatttactcatactgtttctaagtttttcagcatagtcattgcacttcagcagggaatctgagtatactttacagacagagtgaacttaaaagtttaatgtcaagagattatggcttaaataaattagtgtgtcctatagggggaaaaaaaccaagaaaccaccttttaaaaagaatgatatgccatatacccttgattttcattttgcattatattgacgtgtttttttgaaggaaaaaaagtaataaaaatctgatagtctaagactccactatttaaaagcctaattactttaaaaatatgcatactttcagaacttttaccaaaacacacaactgttgaagcagtcacttctctatggaagtatgcatattggtgtcagtttctttgtacagttgtacttagatattttttatgatttttcatgtgcaggtatcaaggttttgaagttttagtaaaagaaattctgtagattacattcccaagaacataatgcttacacaaaatgtatattccacgttttaaagcttaattgtattttactttacatatacacttcagttaacatagagcacttagaatctatttggtatttttgatttctcaaagtaaaaaaaaaattagatttttaggtttgatatggttgtgtcataatcatctcgtaattgacaattttaacttttggcaataaaaggaaattgggatatctttggaactgtaaaacctggtttaatctttttctttctagactcttgatagattggataattaaacagtatccagagaaactaaagaaatgggcattttaattgcatattttatcttgagttactttttaatgaacactgctcattacaactttacaaaccaaaagtgtttactaattccagtaactaccatttctttttcagctagatgagtgatcggaaaatttttgttgcatttcaaaatctaaataaactacagactttatccttataccatgaatgtttttttttaatactctgtcttaaaataatacagcatggtacaataaatagtgcttttatgtatatatacacacacacacttttctgaagaatgatggtttgagttatgcgttgggcagttttgatttttggaagttatattagttattgactctttgttacaactttttcatttttacattttaaattttctgccatcgttgtcacaatgcacatcctgatatagcaccagtgaaaatctaaaattaatacccttggaaaatgaaaatattcttaatttccattttgactcttatactggccctatagctctgcagtctttgtttcaatatagaatatgttatccatttaaattattttttcttttatttaatgttatcccaagactgttctcataaagaaagggaagaaataactatccacccttaacatccttcatttattttgaatatattggtgtttttatgataaggaatataaattatatttaatgtggtttcctgtatactttggttattaagttttgcttgaaatagtagttttcccgtttgacagctttctttgctgccaaagttttcaagaatttaagacttctttgaagtaaatatttaagttctgccattattgactcttaagattgtgtgtgttgtgttgtgcattacataattacaaaaaggcttcattcaggtgatacgttaaaaatggaactgtgctcaccctaaataggcattggtatttttctcttttggtgagagtaggcatttatttcttgagttgttttggagcctgatcaaaaattttgttcatggagaacttgatgcaattttgatacagtggagaggtttttttcggttgttttaacatcaccagcatagtttttagaatgtgactcttgctgagcatttagggtgagcttgggaaggaaggcctttgaaaatggtagttatgcaagcagactttcaggtgttgcattcctgttttcaacacatttctttaaatctacataatggcagacttttctaccaggttataagcagtttttagataagtgatactcagccagcataacttattgacttaccatttacgtatagtcatcactctcttactgtgaaattccaaatgcctaccagagttaccttgttctatcataatatgacaaacatctcaacagttttggatttccccactttggttcagaaggttatttaatttctatctgggcattaatggagaaaataagtagccttgtgtgctgcttcagattgaaacatggaggatatgagatattcttctgcaattcatgtttctcatttctcaaagtgagcacattgttctataaaaacatgctggtacacccttaaacttttgatcaatctgagtgaggtgtgcttttcctcttgggacctactcacgtttgaagattggaaacatcacgttaggcgaggcagtatctcttgaacatcttctaaagggttttttaaaaccttattctcacatatttcatttgtcttgaatatttaagtggctcttaaacgttttgggtctacatgcaaatgtggtacttaacaaggtaggaatccatcttcttagctctggctgagggtgccagccatcggtcaggtcatttttatctcaagaggcagaaggcagttatgtcaagaattgtgctcagggcaggatttcgtttccacagaggagagacacttgcagagtgccagctaggttagatcttttgccgcttctttcatttgattaatttgggtttttaaagggctgtttaaaaaaaaaaaaaaaaggccgggaaactttaaaagtaggcattactgtagtactgcatttcttagaacattttaaactagaactcatttttttttcacagtatatttacttgaagaagcactataataatcattgagaagtattttgagtctgaaatttaatttaattttccgtttcaaattgctttatttcagggaaataattttccagttgttttgctatattctgcaaataaaaaccgtgtttccttttttcacttaaactttggtaggaaacaaactaaagcagacaaacatttcttgttatgtttgttgctttctttaatccaatggataaaaaagtaaaaccctgtaaacattattttatttttttatgcaataccatgctgtaaatatggttcatcaaataaggatgtacctatgattgaatctttaattctgcacagttagagtttatatataaacgtgtcttgacaatcaaggacttttatgtgagtcttcctttatgatgtttattaatgttatgcattccatttgttttgaagtgagtaccaatgtgctaatttgtattgtctgaaagtatgtaatgtttttacagcttgtttttaagaatctgtaaatatgtacaaacaaatcacagtactgctttatgttagaaggcatatgatgttgtactgtatgtaagcaataatacatagcagtgctaactttacaagtagcatcaggaaagttctaaaaacatttcagagttattaattatccttatttcatttaataatgattatctttaatcagtttttataagcaaattccattgttcctcctattggaacgtaacactgtttacacagcataattgaagttgcaggggagacaggctaaatctgacttcatctgtactcactttcactaagcattgaatggccttaccactcttctgcaagatggaggaagaccgcaaaacttagtgcccatcacactgaaggaagggatgtggttttttttcctgcttctgtactgctacctaactttgtgatttgctttggattttaatatttgtttctgttttagattcaagcccgtaagttttgaggtgacttcagctccattgtgaaatagatagttctcttcatatttcataactacatttcaataattctaaactttctacattgatttttagatacttatttttcaagcttggtttctcagctgatcagatgaatttattcaacttcaatacaaagaaagacaaacctattatagtttcaagtgagtagatattatactgtacaggacagctatttgaacacacacatcactgctttagaaataaaaccgccaatttataaatgtatatgacctacattttataggaaaaaatgtttttaaatgctagtcatttatataatgtgctttgaaggatttgctagtccacttctgtcactttttagtacactggtatcttttatatgtaatgtatgctttttattattgtagcaaagcatttcagtagaaagaattttgcaacaatatgggggaaatttttcattgttggatttgaattatactggattttatctgtgtagtcttacttgtctttattttaatgctgtctgaagggaacttggtatccaaataaagcaggtaacctcattttacttcaagggcatactgtgtagtgctgaatttaatctgaaaatctgatgattttgaaaagaaaaacaagtttataaacattgtacagaagaaattaaatgtgtgtgatggaaatcctgatggtggagcacgttgaattttctgatatatagtgttattttcctgggatcccctatgccttctttgtatttcaactaataaaggaaaaaccctgtcattaaaactggtaagataataggatattctgattatacagtattactattcctatcccattttctgaccttttctcaatcactgtaaatttttattttctatttcctattgataattaaatatgtacataatatagacactgttgtatagaactaaatgaattgggttgctatgcttgagtgggtagtgaaatggaaatatttgatgaatactgagagttcctaaaatgctagagcaaatttccgagggaaaggggggcatcgtgtgtcttgggaaggttgcagcaggttgtttcttcaactccctaagaaatcattgggaaggactcaactgcaaactcgggatcagatacaaaatgggtctttccttcccctctcccccaaaaaataggagcactaaattttaaaatctactcaggtgacagttgctttgcaatgaaacttatcacattgaaattttcagtgttaaataaaaagagatttgtgatatttttaaatataaacttttacatcagtagtcagcagcctgacaattgaaatttggtaagtcgatatattttaaaatattttgctctccaaatagaattgtttttaaacaattgggaggttttttgtttctttaaatatgttttaattgtcattgtaaaaacaaaatcttgcttgaccctatattatgccatgaatgaattgctgagcctttataatacagtgacagcttgtttcatgcatagtcatggaacatagagatgttctttaaactgacctattgataagaggtttaatgagtttcacggctttcaacactattgtcatatagttatctttgccatttggagtttataaaaccattttatgtattgtgatactaaaggaagttgttttgctttactttaaattgaattattagactaatatttgcaaattctgcattttaaatgtggacactggctgtttgaaaaataaaatatagaatacagttttatggataattttcgagctgaatttttcacaatattctgaaccaaataacgaatggtaaatatgcaaaaatcatggtgcatagatataaccgtaaagagaaaagaatttctgtgtggaattaacagttacacaaattgggtaacaattatcagggcctttattatagctttatgtggaatgttattctaaaatgcaagagtcaaatgttactgtcattgaatattttagacttgaaacgtgtttatcatagagcgaagaaaatatgtgttcttttctttacagataagactctgttaacccactgtcagcatacgtgggatttcttttcttttttctttcattagtggagatttgttttcatccatctaccaccttgccagtaccctagcttgtgaccagcgggatgcattgtaagaaagttgtctgtggttaggagtgcagtctgggtccatggaacaaatttaaactaattggccctcgcaatgatcagtcctaggaccctggccttattattagcatggtgctttaaccaattgtacataataataccactgatagtctactaatgcatttcctagatcccagtttttcttgaatgattaggaatggtggggagaggggaggggagatattctacatgatacttctccaatcttctaaagattataagaaaaaataaaaaattgaagtcacttgaaaaaaaaaaaaaaaaaaaaaaaaaaaaaaaa

SEQ ID NO: 1220 - DNA, 2767 bp, Homo sapiens
atgcgccggaagttgcagccgggaagcctgcgaggtcggttccgcccgactctaacatggcggcgccctttgtctgctctggagtgccgtccccggccttctcgcggccgtgatgcacctccctctgcggtggggtccgggacatggcaggtaatgagccggacgaggggagccaagctggagtttacacaggcaaactgtcagaaaagagtagcctgggctgtctggaaatctgagccatggactttccccagcacagccagcatgtcttggaacagctgaaccagcagcggcagctggggcttctctgtgactgcacctttgtggtggacggtgttcactttaaggctcataaagcagtgctggcggcctgcagcgagtacttcaagatgctcttcgtggaccagaaggacgtggtgcacctggacatcagtaacgcggcaggcctggggcaggtgctggagtttatgtacacggccaagctgagcctgagccctgagaacgtggatgatgtgctggccgtggccactttcctccaaatgcaggacatcatcacggcctgccatgccctcaagtcacttgctgagccggctaccagccctgggggaaatgcggaggccttggccacagaaggaggggacaagagagccaaagaggagaaggtggccaccagcacgctgagcaggctggagcaggcaggacgcagcacacccataggccccagcagggacctcaaggaggagcgcggcggtcaggcccagagtgcggccagcggtgcagagcagacagagaaagccgatgcgccccgggagccgccgcctgtggagctcaagccagaccccacgagtggcatggctgctgcagaagctgaggccgctttgtccgagagctcggagcaagaaatggaggtggagcccgcccggaaaggggaagaggagcaaaaggagcaagaggagcaagaggaggagggcgcagggccagctgaggtcaaggaggagggttcccagctggagaacggagaggcccccgaggagaacgagaatgaggagtcagcgggcacagactcggggcaggagctcggctccgaggcccggggcctgcgctcaggcacctacggcgaccgcacggagtccaaggcctacggctccgtcatccacaagtgcgaggactgtgggaaggagttcacgcacacggggaacttcaagcggcacatccgcatccacacgggggagaagcccttctcgtgccgggagtgcagcaaggccttttccgacccggccgcgtgcaaggcccatgagaagacgcacagccctctgaagccctacggctgcgaggagtgcgggaagagctaccgcctcatcagcctgctgaacctgcacaagaagcggcactcgggcgaggcgcgctaccgctgcgaggactgcggcaagctcttcaccacctcgggcaacctcaagcgccaccagctggtgcacagcggcgagaagccctaccagtgcgactactgcggccgctccttctccgaccccacttccaagatgcgccacctggagacccacgacacggacaaggagcacaagtgcccacactgcgacaagaagttcaaccaggtagggaacctgaaggcccacctgaagatccacatcgctgacgggcccctcaagtgccgagagtgtgggaagcagttcaccacctcagggaacctgaagcggcaccttcggatccacagcggggagaagccctacgtgtgcatccactgccagcgacagtttgcagaccccggcgctctgcagcggcacgtccgcattcacacaggtgagaagccatgccagtgtgtgatgtgcggtaaggccttcacccaggccagctccctcatcgcccacgtgcgccagcacaccggggagaagccctacgtctgcgagcgctgcggcaagagattcgtccagtccagccagttggccaatcatattcgccaccacgacaacatccgcccacacaagtgcagcgtgtgcagcaaggccttcgtgaacgtgggggacctgtccaagcacatcatcattcacactggagagaagccttacctgtgtgataagtgtgggcgtggcttcaaccgggtagacaacctgcgctcccacgtgaagaccgtgcaccagggcaaggcaggcatcaagatcctggagcccgaggagggcagtgaggtcagcgtggtcactgtggatgacatggtcacgctggctaccgaggcactggcagcgacagccgtcactcagctcacagtggtgccggtgggagctgcagtgacagccgatgagacggaagtcctgaaggccgagatcagcaaagctgtgaagcaagtgcaggaagaagaccccaacactcacatcctctacgcctgtgactcctgtggggacaagtttctggatgccaacagcctggctcagcatgtgcgaatccacacagcccaggcactggtcatgttccagacagacgcggacttctatcagcagtatgggccaggtggcacgtggcctgccgggcaggtgctgcaggctggggagctggtcttccgccctcgcgacggggctgagggccagcccgcactggcagagacctcccctacagctcctgaatgtcccccgcctgccgagtgagctggcggcccttctgactgtttatttaaggatggatggcaccctggaaccgggaagggtggcctgttccctagagagaataaattggattattttctaaaaaaaaaaaaaaaaaa

SEQ ID NO: 1221 - DNA, 791 bp, Homo sapiens
cacactggggagaggccttatgagtgcagtgaatgtgggaagttctttccctacagctccagtctccgaaaacaccagagagttcacactggatcaagaccctatgagtgcagtgaatgtgggaaatcctttactcaaaattccggcctcattaagcacaggagggttcacactggggagaagccttatgagtgcacggaatgtgggaaatcctttagccataactccagccttattaaacatcagagaattcatagtcgataaaagccttatgagtggcaaatgtggaaatctgttagcaccctggagaaagtccttgagtacacagtgaatgtcagaaagcttcagctgaaggccatatctcattgagtgccacacagttcacaagggaaagacacttttgatatgtagggatgtccagttgatataacagctctgaaggagatcccttatgagggtggcatcagcctgaattgaacatcctatatctgaacatctgcataaatccaggtatgtgtgaactgcattgcaccttttgccctgcccagggcccatgtcagatttatgtctctgctgatactatagtggaagccattttacctctaccgcctggcaggtgaccaccagtgtgcaccactcacccatcccagtgtattcaggtaagtgaaccttggtgttctgttcatgggaggaatttgtaaatagcccaagcatttattccgttttttttttttcctttctgatgagttaggccatggacctgacccagttttgccagaggaatctgctgg

SEQ ID NO: 1222 - DNA, 2673 bp, Homo sapiens
ctccgagcaggacactgctacttaacaaggtggtttgagccaagtatgtgtcttgcgggtctttgcgaaagtgaaccagttattaggggcgcctaacgacctggggggtcaactaaggggactgtggcacgtttcaggcaggattcctccttcattcaaactgcatcacccaggagtctgcaaattccccaaagtaggaggaaaaatgaccacattcaaggaggcagtgaccttcaaggatgtggctgtggtcttcactgaggaggagctggggctgctggaccctgcccagaggaagctgtaccgagatgtgatgctggagaacttcaggaacctgctctcagtggggcatcaaccgttccaccaagatacttgccacttcctaagggaagaaaagttttggatgatggggacagcaacccaaagagaagggaattcaggaggcaagatccaaactgagttggagtctgttccagaagcaggagcacatgaagagtggtcctgccagcaaatctgggaacaaattgcaaaagacttaaccaggtctcaggactctatcataaataactctcagttctttgaaaatggtgatgtcccctcccaggttgaagcaggactacccacaattcatacaggacagaaaccttcccagggtgggaagtgtaaacagtccatcagtgatgttcccatctttgatcttcctcagcagttatactcagaagagaagtcttatacatgtgatgagtgtggaaaaagcatctgttacatctcagctcttcatgttcatcagagagtccacgtgggagagaaactctttatgtgtgatgtgtgtggcaaggaatttagtcaaagctcacatctgcaaactcatcagagagtccacactggagagaaaccattcaaatgtgagcaatgtgggaaaggtttcagtcgtagatcagcacttaatgttcatcgtaaattacacacaggagagaaaccttacatttgtgaggcatgtgggaaggccttcattcatgattcccagcttaaggaacataagagaatccatactggggagaaaccattcaaatgtgatatatgtggtaagaccttctattttaggtcaagacttaagagccattccatggttcacacaggagaaaaaccatttaggtgtgatacatgtgataagagctttcatcagagatcagcacttaataggcattgcatggtccacacaggagagaaaccgtacagatgtgagcagtgtggaaaaggctttattggtaggctagatttttataagcatcaggtggtccacacaggagaaaaaccatataattgtaaagaatgtgggaagagcttcagatggtcctcatgccttttgaaccatcagcgagtccacagtggagaaaaaagcttcaaatgtgaagaatgtggaaagggattttatacaaattcacaactgtcttcccatcagagatcccacagtggtgaaaagccatataaatgtgaggagtgtgggaagggctatgttactaagtttaatcttgacttgcaccagagggtccacacgggagagagaccttataattgtaaggaatgtgggaagaactttagccgggcctcaagtattttgaatcataagagactccactgccagaaaaaaccattcaaatgtgaggactgtggaaagaggcttgtacacaggacataccgtaaagaccagccgagagactatagtggggaaaacccatccaaatgtgaggattgtgggagacgctacaagaggcgcttgaatctggatatacttttatcattatttctaaatgacacataattgttcatatttatggggtacaacgtgctattttaatgtgtgcatacaatttatagtgatccaatcagtgtaattggtgtatctgttacctcaaacatttaccatttctttgtgttggaaaattcaaaatccatttgagaggagttggtagacagcaagggaagggtccctggagacccccagccaaacgggtcagtgtctcatccccacataacacaaaaagcagcctggggaagacaatcaagctacaggcactgataagggaactagcacaggggattgtgcctggagacatgcccatggctgcacagatagaagaacctccagcccattcaggtaaaaactcgcacaaacctccggctcactcagttaagggaacaagaccagacacagaaatgcctttgtcctttgtataatcagcaggctccgaggaaaaagtttcttcttttgtgggcatgaacacagtgggcttcagtaggttcaggttggcactttcttttgtggaaaaggaaaagcccagcctctgtaaatcatcacttcagctcctgattggtcccaggccaagctgaatagcccttaggaataatcacttcaactcctgattggtcccgggccaagctgaatagcccttatgaatcatcacttcggttcctgattggtcccgggccaaggtcccagaccaagctgaatcacgctttctccaagacagcccgcaggctaagtgcattccttccccttcccagtccataaaaaccccggaccccagcctcatactgggcaacttatttggatccccatctccactgtggagagcttttttctttcacttattaaacttttactccaatttc

SEQ ID NO: 1223 - DNA, 1695 bp, Homo sapiens
gaggctgcaggaccctctacacacagacagctgtccagcacggaaggtgggctgaggcccagggtgaacatgccagctaatgggacatcaccccagagattccctgccctgattccaggagaacctggcagatcttttgaggggtccgtgtcattcgaggatgtggctgtggatttcacccgacaggagtggcacagactggaccctgctcagaggaccatgcacaaggatgtgatgctggagacctacagcaacctggcatctgtgggcctctgcgtggccaaaccagagatgatcttcaagttggagcgaggagaagagctgtggatattagaggaggaatcctcaggccatggttactcaggatctctctcactgctgtgtggcaatggttctgttggggataatgccctcaggcatgataatgaccttcttcaccatcagaagattcaaacattggatcaaaatgttgaatataatggatgcaggaaagccttccatgagaaaacaggctttgttagacgtaaaagaacacccagaggagataaaaactttgaatgtcatgaatgtgggaaagcttactgtaggaagtcaaaccttgttgaacatctgagaatacacacaggagagagaccctatgaatgcggtgaatgtgcaaaaaccttcagtgcaagatcatacctcattgctcatcagaaaactcacacaggggagaggccctttgaatgtaatgaatgtgggaaatcttttggcaggaagtcacaactcatcctacatacaagaacacacactggagagagaccctatgaatgtactgaatgtgggaaaaccttttctgagaaggcaaccctcacgattcatcagagaactcacacaggggagaaaccctatgaatgtagtgaatgtgggaaaacatttcgtgtaaagatatcccttacccaacaccacagaactcatacaggggagaaaccttatgaatgtggggagtgtgggaaaaacttccgtgcaaagaaatccctaaatcagcatcaaagaattcacacaggtgagaaaccctatgagtgtggtgaatgtgggaaattcttccgaatgaagatgactctcaataatcatcaaagaactcacacaggtgaaaagccctatcagtgtaatgaatgtgggaaatctttcagggtgcactcatctcttgggatccatcagagaattcacacaggagagaaaccttacgaatgtaatgagtgtggtaatgctttctatgtgaaagcacgcctaattgaacatcagaggatgcattcaggagagaaaccctacgaatgtagtgaatgtgggaaaatcttcagtatgaagaaatccctttgtcaacaccggagaactcacacaggagagaaaccttatgaatgtagtgaatgtggaaatgccttctatgtgaaagtacgcctcattgaacatcagcgaattcacacaggagagagaccctttgagtgtcaagaatgtgggaaagctttctgccggaaagcacacctcacagaacatcagagaactcacataggctggtcctggcgttgtacaatgaagaaagcctctcactgaagacttccctcaccattggatcaagctccttgggggcatatgatcaccagggcacacagtgtgcctgtgaaaatttggcacctacatttgtatcaaagtatgtcc

SEQ ID NO: 1224 - DNA, 168 bp, Homo sapiens
tataagtgtgaagaatgtggcaaaagctttattctgtcctctcatcttactacacataagataattcatactggagagaaaccctacaaatgtaaagaatgtggcaaagcttttaaccagtcctcaacccttatgaaacataagataattcatactggagagaaaccc

SEQ ID NO: 1225 - DNA, 2546 bp, Homo sapiens
aattcggggcgggacttccgggggtcagccggcgttggctgagacgtcttcgtgccacggtgctgcctcctttccaagcgcgacccgttgaggtccttgtcatgcccagcctcagaactcgccgtgaggaggcagagatggagctctcagttccaggaccatccccctggacccctgcagcccaggcccgtgtgagagatgctcctgctgtgacccaccctggatctgcagcctgtggtaccccctgctgtagtgatactgagctggaagccatctgccctcactatcagcagccagattgtgacaccaggactgaagacaaggagtttcttcacaaggaagacattcatgaagatttggaatcacaggcagaaatatcagaaaactatgctggtgatgtttcccaggtacccgagcttggagatctgtgtgatgatgtatcagaaagagactggggagtccccgaaggcaggaggctgccacagtccctctcccaggagggggacttcacaccagctgccatggggctccttaggggccccttaggggagaaagatctggactgtaatggttttgacagtcgcttcagtctgagcccaaacctgatggcatgtcaggaaatccctacagaagagaggccacatccatatgacatgggtggccagagtttccagcacagtgtggacctaactggtcatgagggggttcccacagctgaaagtccactcatatgtaatgagtgtgggaaaaccttccaaggaaatcctgaccttattcagcgtcaaatagtccacactggggaggcttcctttatgtgtgatgattgtgggaaaaccttcagccagaactcagttcttaaaaaccgtcatcgatctcatatgagtgagaaagcttaccagtgcagcgaatgtgggaaagccttccgagggcactcagacttttctaggcatcagagtcaccacagcagtgagaggccttatatgtgtaatgaatgtggaaaagccttcagccagaactcgagccttaaaaagcaccaaaagtctcacatgagtgagaagccctatgaatgcaatgaatgtgggaaggcttttaggcggagctcaaacctcatccaacatcaaagaatccattctggggagaaaccgtatgtgtgcagtgagtgtgggaaggccttcaggcgaagctcaaacctcatcaaacaccacaggactcacacaggagagaagccttttgagtgtggcgagtgtgggaaagccttcagccagagtgcacacctgaggaagcaccagagggtccacactggagagaagccttatgagtgtaatgattgtggcaagcccttcagtcgggtctccaacctcattaagcaccacagggttcacactggagagaagccctataagtgcagtgactgtgggaaagcatttagtcagagctccagccttattcagcatcggagaattcacactggagaaaagcctcacgtgtgtaatgtatgtggaaaagcctttagttatagctcagtgctccgaaagcaccagatcatccacacgggagagaagccgtacagatgcagtgtctgtgggaaggccttcagccacagctcagccctcattcagcaccagggcgtgcacacaggcgacaagccctacgcctgccacgagtgtgggaagacctttggtcgcagctccaacctcatccttcaccagcgagtccacactggagagaagccctatgaatgtactgaatgtggaaaaaccttcagccagagctcaaccctcattcagcatcagaggattcataatgggctgaagccccatgaatgtaaccagtgtggtaaagccttcaaccgaagctcaaatctcattcaccaccagaaagttcatactggggaaaaaccctacacctgtgttgaatgtggtaagggcttcagccagagctcacacctcattcagcatcagataatccacacgggcgagcgcccctacaaatgcagtgagtgtgggaaagccttcagtcagcgttcggtcctcatccagcaccagaggattcacactggggtgaagccctatgactgtgctgcttgtgggaaagccttcagccagcgatcaaagttgatcaaacaccagttgattcacaccagggaataggctgttgggctggcaggagtgaaaccgagcatagtttcctctccaactcctctttggccattgtctcagcctctgccacttcccagaccgaaagcctggactcagctcactgcctacatccagtggccacatagcctgggaccctcctttgaaacatcctttacaggctcccttctcactgccactgctcttgcctcttgtgatgtcttgggtttgggcttgtttttacagcttgtgaacggactgcacgtttgttacaagggagaagattatggaggctgcatattcatgaatagagtttattattataatgaaaagttaccaaaaaagtaaagtgacgtttggtttgagataaccatagtagtttgtttgattggtaaaaaaaaaaaaaaaaaa

SEQ ID NO: 1226 - DNA, 509 bp, Homo sapiens
gtcttcactcagaactcacaccttgcaaatcatcaaaggactcacaccggagagaaaccttaccgatgcaatgagtgtgggaaagccttcagtgttcgttcaagcctaaccacccatcaggcaatccatactgggaaaaaaccttacaaatgtaatgaatgtggcaaggtctttactcaaaatgctcacctggcaaatcaccgaagaattcatactggggagaaaccttacaggtgtacagagtgtgggaaagcctttagggtaagatcaagtctaactacccatatggcaatccacactggagaaaagcgttacaaatgtaatgagtgtggcaaggtcttcaggcagagttcaaatcttgcaagtcatcacagaatgcataccggagagaaaccttacaagtgtaatgagtgtggaaaagcctttagaggacattcaaacctaactacccatagagtgccatccctgagagaccagaccgctccccaatactctcctaaaataaacat

SEQ ID NO: 1227 - DNA, 4652 bp, Homo sapiens
gtggccgcgctcggcgctgccatgttgaggagccgccgctgccgttgccgccgccgccgccgccgctttgttgtcgcctcctccggctgaggaggctccccgagcggggggagtggggaggaggggggtcggccgccgcagccatggaggccaactggaccgcgttcctgttccaggcccatgaagcttcccatcaccaacagcaggcagcacagaacagcttgctgcccctcctgagctctgccgtggagccccctgatcagaaaccattgcttccaataccaataactcagaaacctcagggtgcaccagaaacattaaaggatgccattgggattaaaaaagaaaaacccaaaacttcatttgtgtgcacttactgcagtaaagctttcagggacagctatcacctgaggcgccacgaatcctgccacacagggatcaagttggtgtcccggccaaagaaaacccccaccacggtggttccccttatctctaccatcgctggggacagcagccgaacttcgttggtctcgaccattgcaggcatcttgtcaacagtcactacatcttcctcgggcaccaaccccagtagcagtgccagcaccacagctatgccagtgacccagtctgtcaagaaacccagtaagcctgtcaagaagaaccatgcttgtgagatgtgtgggaaggccttccgagatgtgtaccatctcaatcgacacaagctctcccattcagatgagaaaccctttgagtgtcctatttgtaatcagcgcttcaagaggaaggaccggatgacttaccatgtgaggtctcatgaaggaggcatcaccaaaccctatacttgcagtgtttgtgggaaaggcttctcaaggcctgaccacttaagctgtcatgtaaaacatgtccattcaacagaaagacccttcaaatgccaaacgtgcactgctgcctttgccaccaaagacagactgcggacacacatggtgcgccatgaaggcaaggtatcatgtaacatctgtgggaagctcctgagtgcagcatacatcaccagccacttaaagactcatgggcagagccaaagtatcaactgtaatacatgtaaacaaggcatcagtaaaacatgcatgagtgaagagaccagtaaccaaaagcagcagcagcagcagcagcagcagcagcagcagcagcaacaacaacaacaacaacatgtgacaagctggccagggaagcaagtagaaacactgagactgtgggaagaagctgttaaagcaaggaagaaagaagctgctaacctgtgccaaacctccacggctgctacgacacctgtgactctcactactccattcagtataacatcctctgtgtcgtctgggactatgtcaaacccagtcacagtggcagctgcaatgagcatgagaagtccagtaaatgtttcaagtgcagttaacataaccagcccaatgaacatagggcatcctgtaactataaccagtccattatccatgacctctcctttaacactcactaccccagtcaacctccccacccccgtcactgccccagtgaatatagcacaccctgtcaccatcacatctccaatgaatctacccacacctatgacattagccgcccctctcaatatagcaatgagacctgtagagagcatgcctttcttgccccaagctttgcctacatcaccgccttggtaaacagtattataaaatcaaaatatgggtaaaagtaaatatttaccagcaacttaacttttagttgattaaagcaaaaagtaaaccatgaaattgggagattttattacattagttaataagagtgtggtagcatttttctccaatttggctgggattattcaaagtagggtgtgtatgtaacttatcactggaccactttagtttaatcagaaattccttttagctgacaacattgcttaaacaggatagtagttggcaagatgaaatgccagaattaaaaccaatcataagtagaacccacttcaaaataaaaaaacagcattactatttctaatcccaaggaatcactttattgtaaacactagcagaactcttctccctatacaaggtggatggctgattttaacctgaaattttaaatccacagattgagagctagtgtagaattgtctgtgtttattgtttttatgagtaaatacatgcattgtcataataaaatgcatttcagagaatatgcattttacctttgggaatatgttaatttcaggcagcattccctatgggaaaggtgataccagctctgatatgcaaagcatatgataatttatcattctaacttcaacgtataatagggattgtgacctgatatttggagatgtaaatattgctcagcatattaatcccgatggaatatagcattgtagttgactttttaaaaaaaaaaaaaatttaaaaaaaatctacaaattgtgttttgctaagaaaagcctcaactgacagaggagaagtcaagtgtgtggacaggcaagctcctaataaacagagtccagtgggattcctatttaggagccaaggagtactttggaacagtacaaatatattgctttaaattggaagacgctggaggcactgggatgtgatatgcccctctctctcccaatcagagcctgttgatattacaacagggacagatgtgttagttgctcactagagtttatgtcttatattaaattgtatacagtttttattctaaccactaactaggtagtgtatgccccttcagaacatgcagagtgtatctttttttaaatttctccttccgtttcttaagtattgcgcagatttgttcaactttgtaaatatggacatcactttttttttctttgagaaaacacttgtatcagctttgtggtgttttcagggagacagctgtctgcattccctgtagaaacccagcaatgattatgcacgttgagacatgtgctttttatttcttagcaagatattttatctctgtacataaagtagaaaccaaaagctagggaaacagatactctttacaccatcatgccacgcattgtttttaaagcattgcgttaaaaaaaaaattaactaaaccaagatgctgtgattttttaagttgcaatatgtttttggtttttttcattttttaatcattgcagttaagagaaatggaaattagttgtgttaatcttgcagaatgtttgcaggactgactatcaaactggatgatttccatttataccctactgtgtcagttcaagcatcaaaataccttgcatctgagacagacttcctacatcagggacaggtatctgtgtgtcattatacaaaacagttctagggggttgaactacatagtaaaaaaataaaataaatagtacttagtgtaaaataattttataaatgatcttttgtactttaggacattaaattgtacaacttttgtatatataaaagcttaggaactttctgtttagcaggaaggcaacacattcctacacttttaatgtatatgtttgttataatgtccatgtaaacatgccctatgtttgtgccttttaattagtttgtctcaataaacaaaatgtagagaaaaatatgtagctatgactttgttacaactgttcttatccacagtacaaaaatggtttgtttttaatatgtagagcattatgtgtggactactggaaggactcgtgtagggaaagcccaagaatgaccttgctgaggcctggattgggaggcacagtggccacatttggaggaagttcacatttcctggcatgcagacccaaaactgggttctggctctgcctgctgggatctgttatctctggtgggctggcagtcataattcacaattcagacagcccaggcttcctccacagtggtccaaggagcagtcctcagtgggggcaggtgtgggccctacccctaagctagaatgtggttgtcagaaccctgaaagtattagttctaaaaaaaaaaagatatatactagaagtaattgttttatcaattcattgtataataaacaggagtgagacttcattgtatgacttcagttaaaatactattttgtatgcattctttattcacttaagaagcttgtctgcaataataaagccacgtcatgtcttcttttgggagggagagagtcgatggcaggagggggttttgggtgggccactgaaaaggggtaccgaataggttgtgtgatgaaattctgtgtcttggaactggaattgagtttcgatgttgatgaactgattcaaccaggtgttgaaggcacgacagccactgctctacgaaaaggcagagtacgtttttcccttctggttgtaacctggttgagagcttcccctttatcagattggcagctaaacagttgtattagataatccttaaatctgacatccagcctgttacgctctagggctcgctgcttggcctgcgtttgctttttattgtgtatccgttcccctcctacggtgtgctcctgaatgaaggtttctatgtaagcagatgatgattttacctgtcaataccagcactgtattactaacatgcaaaatactgcagatttattttgaaaattaaagttaactggtcacaaatgtaaaaaaaaaaaaaaaaaaa

SEQ ID NO: 1228 - DNA, 2411 bp, Homo sapiens
cttttcaggagtcccttctgttatttagcaagacacactactacaatggagaaaaaagatgccccctccttcaagccctgagatcttcaggactttggcgaaaagtctgcgcccgaagagacccaggaaggattcttggaattgtagtccaaaggcatcccgccttctgcgcagactcacaagtccctgtggacggaattcttgaagtgtagcgccgctcagtccttccaccggaagtgtccgatcggaatcagccctgtccgagaggtgagtccgggtttggggatccagatgtccagccccgtgtccccctccaaacatccagtccctctcatattgcctttgaaattagcagcctctgggtgaccagaccttggccctcagaggaatcccggagaaaggtagaaccagcttcggcgttgggaacgcaggcgcgcttacgcatttagtgagggtttggcggtctccatagttaccgccgccgcgcgtgacgtcatagtggagcgctgagggcttggtggcgtggggtgggggctgtcctactgatcctgaatttggggtcactggtaagaggagttgcccattccagccaggtggaacggggaggggtgccacatgtctcagatctgccattgtctgcgaaaagaaactgctgcgaggaccatccccaatcccctgcttcccttgggaagagtaaccgccgttttgtaggacacttggggacaaccccgcttgtcctgaaatttattgacacggtaaatagtatttcctgtgtgccgaggatgcagttaaaccaacactgaccccctgcccttgagaaacacaagatggctacagaaccaaagaaagctgcagcccagaactctccagaggatgaaggacttctgatagtgaagatagaagaggaagaatttatccatgggcaggacacttgcttacagagaagtgaactccttaagcaggagctctgcaggcagctttttaggcagttctgctaccaggattctcctggacctcgcgaggcactgagccgcctccgggagctctgctgtcagtggctgaagccagagatccataccaaggaacagattctggaactgctggtgctagagcagttcctgaccatcctgccaggagatttgcaggcctgggtacatgaacattacccagagagtggagaggaggcagtgaccatactagaagatttggagagaggcactgatgaagcagtactccaggttcaagcccatgaacatggacaagaaatattccagaaaaaagtgtcacctcctggaccagcacttaatgtcaagttacagccagtggagaccaaggcccattttgattcatcagaaccccagctcctatgggactgtgataatgagagtgaaaacagtagatccatgccaaagctggaaatttttgaaaaaattgaatcacagagaattatatctggaagaatctcaggatacatatcagaagcatctggtgagtctcaagacatctgtaagtctgcaggcagggtaaagagacaatgggaaaaagaatcaggggagtctcagagactctcgtctgcccaggatgaaggttttggtaaaatcctcacccacaaaaatacagtcagaggtgaaataataagccacgatggatgtgagaggagattaaatctgaactcaaatgaattcacacaccagaaatcttgtaaacatggtacctgtgaccagagcttcaaatggaactcagattttattaaccatcaaataatttatgctggagaaaaaaatcaccaatatggaaaatctttcaagagcccaaaacttgctaaacatgcagcagttttcagtggagataaaactcatcagtgtaatgaatgtgggaaagctttcaggcacagctcaaaacttgctaggcatcagagaatccacactggagagagatgctatgaatgtaatgaatgtgggaaaagctttgcagagagctcagatcttactagacatcggcgaattcacactggggaaagaccctttggttgcaaagaatgtgggagagcattcaacctgaactcacatcttatcaggcatcagagaattcacaccagagagaaaccctacgagtgtagtgaatgtgggaaaaccttccgagtgagctcacatcttattcgacactttagaattcacactggagaaaaaccctatgaatgcagtgagtgtggaagagccttcagtcagagctcaaaccttagtcaacaccagagaattcacatgagggaaaacctattaatgtaaggaacttaaatttgtaagtaaatgctgaggaaatggcacaatatgaaaaatattaaataaaaaataaatattgggcaagatggaagactgaaaaaaaaaaaaaaaaaaaaaaaaaaaaaaaaaaaa

SEQ ID NO: 1229 - DNA, 1667 bp, Homo sapiens
gaattccagccaagttttccccacctggtgccttttctagctcgcagctcctcagacaatatgcgctaagtggccatcccacacagatcttcccaagctcatctgcaggaggtgacttccaactagaagctccaagatgctctagtgaaaaaggagaaagtggagagacagaaggccccgacagctcattaagaaagaggccaagcagaatttctaggacattcttcagcccacatcaaggtgacccagtagaatgggtagaagggaacagagaaggaggaacagaccttcgcctggcccaaaggatgagtcttggggggtcagacacaatgttgaagggagcagacacttcagaatctggagcagtcatacgtggaaactatagactgggacttagcaaaaagtcaagcctgttcagccaccagaagcatcatgtgtgccctgaatgcgggagaggcttttgccagagatcagaccttatcaagcaccagaggacacacaccggggagaagccatacctgtgtcctgagtgtgggcgtcggtttagccagaaggctccctctcccatacaccagaggaagcactcgggggagaagccgtatgtgtgcagggaatgtgggcgacacttcaggtatacatcctctctcactaatcacaagaggattcactccggggagaggccctttgtatgtcaggagtgtgggcgaggctttcgccagaagatagccctccttctacaccagaggacgcacttggaggagaagcccttcgtgtgtctgagtgtgggagaggctttgcagaaggcatcactcctccagcaccagagctcacacacaggggagaggcccttcctctcccttgagtgtgggcgtacgttcaggcagcagtcactcctccttagtcaccaggtcacacactcaggagagaagccttatgtctgtgctgagtgtgggcacagctttcgccaaaaggtcactctcatcaggcaccagaggacacacacaggggagaagccttacctgtgcccccagtgtgggcggggttttagccagaaggtcaccctcattggacaccagaggacacacacaggggagaagccctacctgtgccctgattgtgggcgtggctttggtcagaatggcaccctcatcagacaccagaggacacacacaggggagaagccttatctgtgccccaagtgtgggcgtgcatttggctttaagtcgctcctcacccgacaccagaggacacactcagaggaggagctttacgtagacagggtgtgtggacaaggacttggccagaagtcacaccttatctctgaccaaaggacacactcaggagagaagccctgcatttgcgatgaatgtgggcgcggctttggctttaagtctgccctcatccgacatcagcggacccattctggggagaagccgtatgtctgcagggagtgtgggcgtggctttagccagaagtctcacttgcatagacacaggaggaccaagtctggtcatcacctcctaccccaagaggtcttctgacctttcctttccccgtgagtgtgaagctggcagaaatcactagtaaatgcttcagtttactgaaatggaatggaaaaaaaaaaaatgttgctttcgtttcatcgatcatagtagtgatttgttctt

SEQ ID NO: 1230 - DNA, 5700 bp, Homo sapiens
gatgaggaggcaccttccaagcaatgtgtttctgtaggagtgtcacaggtcacaactttaaagccagctttgtccacccagaaggcccagccctgtgagacatgtagctcacttctgaaggacattctacacctggctgagcatgacggaacacaccccaagcgtacagccaagctttacctgcaccaaaaggagcatcttagagagaagctcaccagaagtgatgaagggaggccttcgtttgtgaatgacagtgttcacctggcaaagaggaacctcacatgcatgcagggtggcaaggattttactggtgattcagatcttcaacaacaggctcttcacagtgggtggaagccacacagggacactcatggtgtggaggcctttcaaagtggacagaataattacagctgcacccaatgtgggaaagacttttgccaccaacatacactgtttgagcaccagaaaatccacacagaggaaaggccttatgagtgcagtgaatgtggcaaattgtttaggtacaactctgaccttattaaacatcagcgaaatcatactggagaaaggccttataagtgtagtgaatgtggaaaagccttcagcctcaaatacaatgttgttcaacaccagaaaattcacactggagaaaggccttatgagtgcagtgaatgtgggaaagcttttcttagaaagtctcacctacttcagcaccagaggattcacaccaggccaaggccttatgtgtgtagtgaatgtgggaaggccttccttacacaggctcaccttgttggtcaccagaaaattcatactggagaacggccttatggatgcaatgaatgtgggaaatactttatgtacagttcagcactcattagacatcagaaagttcacactggagaaaggcctttttattgctgtgaatgtgggaaattctttatggacagctgcacactcattattcaccagagagttcatactggagaaaaaccttatgaatgcaacgaatgtgggaaattctttagataccgttccacactcattagacatcagaaagttcacactggagaaaagccttatgagtgtagtgaatgtgggaagttctttatggacacttccacactcattattcatcagagagttcatactggagaaaagccttatgaatgcaacaaatgtgggaaattctttaggtattgcttcacactgaatagacatcagagagttcactctggagagaggccttatgaatgcagtgaatgtggcaaattctttgtggacagctgtacactgaagagtcatcagagagttcacactggagaaagaccttttgaatgcagcatttgtgggaaatcctttagatgtcgctccacacttgatacacatcagagaattcacactggtgaaaggccttatgagtgtagtgaatgtgggaaattctttaggcacaactcaaatcatattagacatcggagaaatcactttggagaaaggtcttttgagtgcactgagtgtgggagagtttttagccaaaattcccacctcattcggcaccaaaaagttcacactagggaaagaacttacaaatgcagcaaatgtgggaaattttttatggacagctccacactcattagtcatgagagagttcatactggagaaaagccttatgagtgcagtgaatgtgggaaagtctttagatacaactccagcctcattaaacatcggagaattcacactggagagagaccttatcagtgcagtgaatgtggaagagtctttaaccaaaattctcatctcattcagcaccagaaagttcacaccagataaagaatgtatatataaagcagatggggaaagacttcacacagaaatctactctgatttagcactgggacctacgttttaaaaaaagtattcttgtagaatacagataacataaaatctaacatcttaaccatgttaaagtgtatagttcagtaccgttaagtcattcacattgtgcaatgaatatctagaagtcttttcaacttatgaaactaagtctataccttttaaaaccttattcctcactccatccagcctcttgacaagcaccgctctgtatgaattttactagtccgggtacctcatataagaaaacttaagttttggtcttcttgtggtttattttgtggcttattttgcttaacgttatatttttaaggtttcatgttctaatccattagaatttccatcctttttaaaggctgaataaaattctgttagtcatgtgttgcttaacagtggggaagtgtcctgagaaaagtgttattaggtgattttctttctttttttggtggtggggggattgcgtgaatgcctaggctgtatggtatatcctatagcaccttgctacaaacttgtatagcatattactgtactgaatactgtaggctgttggaacacatggtaagtaattgtttttaagtatatctaaacagaaaaggtacagtaaaaatacagtataaaagaaaaaatgatagactcacagagaacttaccatgaatggagcttacagtactgcaagttgctctaggtgagtcagtgagtggtaagtgaatgtgaaggcctaggttgttactgtgctgtagactttatagacattgtgtacttagacgacaatacatttttatttttattattatttttgagacagaatcttgctctgttgcccagactagagtgcagtggtgcaatcttggcttcctgcaacctcctccacctcctggttcaagcagttctgcctcagcttcccaagtgtctgggattacaggcatgcaccaccatgccccgctaatttttgtatttttagtagagaacggggtcttaccatgttggccaggctggtctcaaactcccgacctcaagtgagccactcgctttggcctcccaaagtgctgggattacaggcatgagccaccgcacccggccggttttaccatttttagagccaagctttactatatatttgatatttgttctttcttcaaccttagctgaattcacattcctctgatagaaggtgttttcaaactgatgccgttcttagtgcctcaaactagatcctgttcatacttgttagaacaagttattacaaattcactttggtgtaaaaaattgaaatccatacataattttttttttttttttgacagagtctcactaacgctaggttggagtgcagtggcatggtctcggctcattgcaacctccgcctcctgggttcaagcagttctcctgcctcagcctcttgagtagctgggattacaggtgcccacaatcacgcccagctaatttttgtatttttagtggagatgggttttcactctgttggccaggctgctctcgaactcctgacctcaggtgatccacctgcctgggcctcacaaagtgctgtgattacaggcttaagccaccacccctggccaattttttcataatatacatttttttctcatttttcatgaaacttttgaagacccctcatattctagatattccttctcagatatgtggttttcaaatactttctcccattgagtctttttccttttcactctgtccattatgtccttttttacacaggaattttgaatttaaatggagtctaatatatctgttttataagtctttgatgcatttgagttcattttagcaacttaattcttttgcgtgtggatatccagttttttttttttaacatcaaaagaataatgtttttgcctagcattaaggcccttggtagaggcttgtcagttacaattttggagcagcagattaagtccacactcccaaccattttccttatcaggctctcaaactctgggccacaatatgtaagacccaatcaccccaggatcaggaatcagatatctagggacagcttctgtgcccaggagcttgtaaaattattccattggtcaatgcacaggggtccctgaaaacctagctaaccccaatttacatggcacacacaagctgccccctaagctccagcttgctgttatcttgggttccctcataactcttgcagccctgcctatgtccttaggtttcaagctgtaagtagcaaagtggtctacattttatgattatcattgtgacatgtcctgacatcagaaaaacacctttgtatgttattactatacaaccagcagaatattatgagtgcagcaaatgttagaaagtattcagcctaacttcactgagcaagagtaagttcatcctggagaaagtccttaggaatgcaggcaatatactttttttcctttgtcaacaggtcaaaaacagcaaagctctatcgagcttgtcttactcaccctatttttttgttgctctgttttgttttaggcttttagcctgaagccatggttttgtttctgtctctagtggtaggtggacaagaggaatgagatgagaaaggagctttactggcccagctagaaacaaactaagaacccatgactgtattctttcccttggatgaccctgtgttagcttgttgagggagatctcagcctgaaattgaatctcacatccaaacatccacgcaagggagatttgttgtaattgtcagatatatggtaaatttttgtgaatgatgttgcactttctgacctgcctggggcctttccagagttaagttgctgaaagtgtgcattacagaagactcctgctattagctgtcatggtgccacaatgtgcatcaccttagtcaccttaaattacttagagagtgataaggtctggacttctggttaaatgtttttaaaaaatggggggtgggggggtggtgcatagattgctgtgttctctacctttatctggaatattcagtcatttgttccctttgggggcctcattcccagtcccctgactggtttgggtgtggacatcacccagctttggacagagaacacacgccaacttcagctggcagcttgtagagatttccttttttcagaggtattattagttgtctgatactgataatgttgatgataaattttctaccttccaagcttcccaacccagtcaatttccacctaagcattgctgttttcttctgatgataaaggtcatattgtttaagctacatttactcttggggttctcttcactgtgtgctgcgggttgagaacaaaattaggctttgccagaatgaaaaagtgaatggtttttggggccttcaactttttgtgctcttgaagaaataagaagacaaaatagctttcaatccacatcaggcccaatttgcattgcttcgggagttcctgggaaagtgacggacttctatccaaaatcgcgccgtgaatttgattattggtagttctacagtcagcttgagggttgttggtttgacagttgtcagagcatgttgcagctgtatgaggtgggtatctgtacatatggatgtcccatattctccagcattgcataggaatagctggtgtctagatcctgcctcaggagctatgtgtcctgaatttaaaaatcaggtatgttatatccctggggcatgtcagacatacaacaacagtgcattagtccattttccattgcttacaacaaaataccttaaactgggtaatttgtaaagaaaataaatttcttactgttgttttgttgtgctttctttttttctagatcgcgagcggccgc

SEQ ID NO: 1231 - DNA, 2498 bp, Homo sapiens
agcgagtggcatcggccccgcccccagcccgtgctcgccggtgtcgggtcctaagtccctcggtcttgggttcccggagaggtgagtcggctgcaggtgggtgcggggcgccgggctgttcggggtaccggtgtcgcagtcgccagtccgagctcacaccgggcgtggagttcagctgcgcatcgggttgcggcagcttcgccaggcctggggctggctgggccgcggggccgccctggaggccggagccactgggcctgcggcgcctcggcagcgagcagccgctttgctcgcgtgcaggaggctgttcgctacctcacacccccggctggcgctgtggcctcgcttagctctaccgtttagcacccggcgacatgcacccggtcggtttccgccaggatgcgggagagttggggcaagctacctgcgacagcttgaacttttcctagggattccgctccacccgccggttagagcgtattgctcattaaatccgagacctgtgtgcttgctactgaaataaaagaagtattttttccccagagtccttttaggacgttatgacttttctcctttgcaagactgcaaaaaactgacaagaagacaaaactcttcccactcccagggaccgcgttgtcttgagtttggctagtaaaggctagcaagtgaggctttgtctctgcatcccgttccccctaacatcctcagagaaccttcgtttctagaatctttctagtattcagagacttctccagggtcatgatcccaaaggcttaacccgtttacaaggagagagttgtctcctgacgcccaaaatggcagctaaaatggagataactttaagctccaacactgaagcttcctccaagcaagagagacacataatagccaaactagaagagaaacggggccctcctctgcaaaaaaactgcccagatcctgagctctgccgccagagcttcagacgcttttgttatcaagaggtgtctggaccccaagaggctctctcccagctccgacagctctgccgtcagtggttgcaacccgagctgcacaccaaggagcagattttggagcttctggtgatggagcagttcctgaccatcctgcccccggagatccaggctcgggtcaggcatcgatgtccaatgagcagcaaggagattgtgaccctcgtggaagattttcacagagcatccaagaaaccaaagcagtgggtggccgtttgtatgcaggggcaaaaggtgctcttggagaaaactggatctcagcttggagaacaggaactgccagactttcaaccgcagactcctaggagagatctcagggagagctctccagcagagccttcccaggcaggagcttatgaccggctgagcccccatcattgggagaaatccccactcctccaagaaccaacccccaaattggctgggacagaggcccccagaatgagaagtgacaacaaggaaaatccacaacaggaaggggctaaaggagcaaagccatgtgcagtgtcagctggcagatccaaagggaatggtctgcagaatcctgaaccaagaggggcaaatatgagtgaacctcggttgtcacggaggcaggtcagctccccaaatgctcaaaagccatttgctcactaccagagacattgcagggtggaatacatcagcagccccctaaaaagccacccactgagagagctaaagaaaagcaaaggaggtaaacggagtctgagcaaccgtttgcaacatcttggtcaccagcccacccgctcagcaaagaaaccctacaaatgtgatgactgtgggaaaagcttcacgtggaattcagagctgaagagacacaagagagtccacacaggagagagaccctacacgtgcggagagtgtggaaactgctttgggcggcagtcaaccctgaagctgcaccagaggatccacactggagagaagccataccagtgtggccagtgtgggaaaagctttcgccagagctcaaaccttcaccagcatcaccgacttcaccatggggactaaaaggagcactccatgctttagattcacacggaaggtgtttgtgtttctcctcccccttacttgcatgtaaatcacaaaaactgtgtgacttacaaggaaagcacgaggcccttgaggaatgatgatgcacattctgctgtgaggaggcccagaaaaggccaaccagggcccaaccgtgcatgatgacagggtgaagagaaggcaggtctgggcactggggcaaagagaacttaagtctctgcagagagcaaggagtaactactgagagagaatcaggacaatcctgcaggtggcccgcttactgttaaatcgtccctctgttgctttatcctctaaaatatgttaagggataaattctatatatatagttatgcatttgctgtcataccagacaattttttatcatgagcacacttctttaataaagatgagtgatctaccagaaaaaaaaaaaaaaaa

SEQ ID NO: 1232 - DNA, 3788 bp, Homo sapiens
agagcgaccatttagcttctgttgttaagtggatctaagcctatgtcgcttactggacgctgaagtgattgggaatattagcagtgggggttctgtagggtcaggaaggggcggctggctttgggggagtgatgaggggcttgttgggggtgggggtgcgtgataaagggatttctcggctgaagacgaggctgtgaggcttctgcagaacccccaggtcaggccacatcattgaggctgcaggatctctcttcatagcccagtacgactctccgccgtgtccctggttggaaaatccaaacacctatccagcttctggctcctgggaaaagtggagttgtcagcaagagagaccgagagtagaagcccagagtggagatgcctgctgatgtgaatttatcccagaagcctcaggtcctgggtccagagaagcaggatggatcttgcgaggcatcagtgtcatttgaggacgtgaccgtggacttcagcagggaggagtggcagcaactggaccctgcccagagatgcctgtaccgggatgtgatgctggagctctatagccatctcttcgcagtggggtatcacattcccaacccagaggtcatcttcagaatgctaaaagaaaaggagccgcgtgtggaggaggctgaagtctcacatcagaggtgtcaagaaagggagtttgggcttgaaatcccacaaaaggagatttctaagaaagcttcatttcaaaaggatatggtaggtgagttcacaagagatggttcatggtgttccattttagaagaactgaggctggatgctgaccgcacaaagaaagatgagcaaaatcaaattcaacccatgagtcacagtgctttcttcaacaagaaaacattgaacacagaaagcaattgtgaatataaggaccctgggaaaatgattcgcacgaggccccaccttgcttcttcacagaaacaacctcagaaatgttgcttatttacagaaagtttgaagctgaacctagaagtgaacggtcagaatgaaagcaatgacacagaacagcttgatgacgttgttgggtctggtcagctattcagccatagctcttctgatgcctgcagcaagaatattcatacaggagagacattttgcaaaggtaaccagtgtagaaaagtctgtggccataaacagtcactcaagcaacatcaaattcatactcagaagaaaccagatggatgttctgaatgtggggggagcttcacccagaagtcacacctctttgcccaacagagaattcatagtgtaggaaacctccatgaatgtggcaaatgtggaaaagccttcatgccacaactaaaactcagtgtatatctgacagatcatacaggtgatataccctgtatatgcaaggaatgtgggaaggtctttattcagagatcagaattgcttacgcaccagaaaacacacactagaaagaagccctataaatgccatgactgtggaaaagcctttttccagatgttatctctcttcagacatcagagaactcacagtagagaaaaactctatgaatgcagtgaatgtggcaaaggcttctcccaaaactcaaccctcattatacatcagaaaattcatactggtgagagacagtatgcatgcagtgaatgtgggaaagcctttacccagaagtcaacactcagcttgcaccagagaatccactcagggcagaagtcctatgtgtgtatcgaatgcgggcaggccttcatccagaaggcacacctgattgtccatcaaagaagccacacaggagaaaaaccttatcagtgccacaactgtgggaaatccttcatttccaagtcacagcttgatatacatcatcgaattcatacaggggagaaaccttatgaatgcagtgactgtggaaaaaccttcacccaaaagtcacacctgaatatacaccagaaaattcatactggagaaagacaccatgtatgcagtgaatgcgggaaagccttcaaccagaagtcaatactcagcatgcatcagagaattcacaccggagagaagccttacaaatgcagtgaatgtgggaaagccttcacttctaagtctcaattcaaagagcatcagcgaattcacacgggtgagaaaccctatgtgtgcactgaatgtgggaaggccttcaacggcaggtcaaatttccataaacatcaaataactcacactagagagaggccttttgtctgttacaaatgtgggaaggcttttgtccagaaatcagagttgattacccatcaaagaactcacatgggagagaaaccctatgaatgccttgactgtgggaaatcgttcagtaagaaaccacaactcaaggtgcatcagcgaattcacacgggagaaagaccttatgtgtgttctgaatgtggaaaggccttcaacaacaggtcaaacttcaataaacaccaaacaactcataccagagacaaatcttacaaatgcagttattctgtgaaaggctttaccaagcaatgaattcctagtgcatcagcatattcataaatgaaatatactccgagtttcttgaagaagagaaaatcttctcagaatcaggtctaattatatgttattgaattcatgcttcagaaaaactctagggatgcactgcatgtgtgaacacatgataaaaaagtcatgctttattttagtgagggcaattacagagaaaagagtaagcagaaatgtccttctgagtactggcctcattaaggattataaattttctccccgggaagaaaccctgactaacgcattgagaaaagcctttctgtaaagaatggtacaagacaggttgttactcgattatttatagtaaaatatgtgggaaattatatcaatgataaccctgtttattgtgggatatcaatatttttaaagtgccaacacagtcatgataggacaatattttatgtgtgtgtgtgcgccttatgtatataagcatatatataatatataagcatattattatatacaggttgagtatcccttctccaaaatgcctgggatcagaagcattttggatttcagatacttacagattttggaatatttgcattatatttattggttgagcatccctaatctgaaaatccaagattaaatgctccaattagcatttcctttgagcgtcatgttagagttcaaaaagtttcagattttgggttttcagattaggaatacccaacctgtatgtacgtatatttctgtatctatgtatgtatatatatgcatatgcagacatatgtatatggtctggtcagcatatgtgtatgtatgcgtatgtatgtatgtatgtatgccctcagtgcagtggggtttgctgcagaattcactgcatagcaggagatgtaagcagatgagttattttttaagagaatctaatctaattgtttttataaaaattattccctattgaatatttatataatgaggttgtatcaacaatgattaactcctttattatacatacacatgaatgtgcatttttggtaaatgcataaatgagattctataatgtttactgatctttatattacagattttctcttcttttaggattagctcagcttgccccccctttccatctccaccatctatagtgagcctctccataattagtgccaaccattagtctcgttcatatttttacaccaggagtcaacaaactgtggccattggccaaatatggcctcccaactgtttttttaaaataaagttttattggaacacagccatgttcatttggaaaa

SEQ ID NO: 1233 - DNA, 2274 bp, Homo sapiens
cgccatctcccatagctgtcgcctgcagctgagaaagggttgctgtcccagcaggccaggtccagggctgggtataagtaagcaagaagagggcctgggagaagagtctgacgagcaaggggaaggtagccaaggatggagtgaaatacagggtgacctgtgtttttcccctggctgctttggaaattatgggaaaaaatcaaataccaaggaagaaaaatctataatgaaattagatgtggatttctttttatgtattcagcttgggggcttatgatacttctagtacccaaagagatgcggtcttgctgtgttgcctaggctggtctcaaactcctgctctcaagtgatcctcctgcctcagcctcctgagtacatttatatttaaagtaattattgatggctctgcctgcttaggactctgcccagccaggaaggaaacctacaggaggaagaatggctgcagggtggctgacaacctggtcacagaactcagtaaccttccaggaagtggcagtggacttttcccaggaggagtgggcattgctggaccctgctcaaaaaaatctatacaaagatgtgatgctggagaactttaggaacctggcctcagtagggtatcagctctgcagacacagtctgatctccaaggtggatcaagaacagctgaagacagatgaaagaggaattttacaaggtgactgtgcagactgggaaactcaacttaaaccaaaagatacaattgctatgcagaacattcctgggggaaaaacatccaatggcataaacacgaactgtgtcagaactcactctggagagatgccctatgaatgcagtgactgtgggaaagccttcatttttcagtcttcccttaagaaacacatgagatctcatactggagagaagccttatgagtgtgatcactgtggaaaatcctttagccagagctctcatctgaatgtgcacaaaagaactcacactggagagaaaccctatgactgtaaggaatgtgggaaggctttcactgttccttcatcccttcagaaacatgtgagaacccacactggagagaaaccctatgaatgcagtgactgtggaaaagccttcatcgatcagtcatcccttaagaaacacacacgctctcacactggagagaagccttatgagtgtaaccagtgtggaaagtccttcagcacaggctcttaccttattgtgcacaagagaactcacactggtgagaaaacctatgagtgtaaagaatgtgggaaggcctttaggaattcctcttgcctgagggtacacgtgagaactcacactggagagaagccttataaatgtattcagtgtgaaaaagcctttagcacaagcactaaccttataatgcacaagcgaatccacaatggccagaaactccatgaatgaaatgactcagggaagtgtttgttgcccctcatgcctcctttctcactttagaacatatattggagagaagccctgttatggtcacctggaaacagccttctggcccaactctggatgcctgttatactgggacaaaccttataaatgttatagctatgattgtttttatcagtgagtatttcattcttatatgtgtcacaactgtagatcctatgaatattttagttatcttttcagtttaattgcattgtgaacagaacacatggtcttcaatatgtagattctgtgtgacatagatttgaacataattgctggacactgactgatgtactgtggcagacagaactagttgctgtctcaatatccattcctcccttctttcttaaagtaataaaatttaccatttagttcaagctggcaatgtggacagttttcacccagcttcccttacagctgtgagcggccaaatatgttcacatccctagcccatgcaaagtaggcagaagtcactggatacagctgctaaggaagctcatggaaatgggaatatctcatctggtgtttttttcttaactatttgccctttgtcttgtcccttatttcctagaaaatatatacaccaagaggaggacagagaaaggatactaaatgaaacaacaggggagatacaatattatctggttgcactaatcctgtgctgcttatctctggatttcatgttacatgagaaaaattaactgccatgtggtttaaaccactcttgtgggaagttcctctttcagctgatttcagtcccaactgttacatctaataaatggtcaagttttaggaatcgttcaaaaaaaaaaaaaa

SEQ ID NO: 1234 - DNA, 3252 bp, Homo sapiens
gtgtctcctccccctggggtgagtccagcagcagcctcctctttcctgactgtcacatttcttttccagctctgaccgggagtcagctcctcggggataccatcccccgacctcaccttctacctaccgcagcctgctagcctttccgggagaaaaggcatccttacctctggttgaaggtctcggggcctccccctctgcatccggaccctctccccatcccagcctcccatgccaaggcccgccttgtcagtcacttccttttgtcatcggcttggcaaacgggagagaaaacagagcttcatgggaaacagcggcaacagttggtcccatacacctttccccaagttggagctaggcctggggccccagcccatggcgccccgggagctccctacctgctccatctgcctggagaggttgcgcgaccccatctcgctggactgtggccacgacttctgcatacggtgcttcagcacacaccgtctcccgggctgtgagccgccctgctgtcctgagtgccggaagatatgcaagcagaagaggggcctccggagcctgggcgagaagatgaagctcctgccgcagcggccgctgccccctgcactgcaggagacgtgtcctgtgagggcggagccgctgctgctggttcgcatcaatgcctctgggggcctcatccttaggatgggggccatcaaccgctgcctgaagcaccctctggccagggacaccccagtctgcctcctcgctgtcctgggggagcagcactcagggaagtccttcctcctcaaccatttgcttcagggcttgccgggcctggagtctggtgagggcggccggccaagaggaggagaggcatccctgcagggctgcaggtggggcgccaatggcctcgccaggggcatatggatgtggagccaccccttcttgctggggaaagaagggaagaaggtggcggtgttcctggtggacacaggggatgccatgagccctgagctgagcagggaaacaaggatcaagctctgtgctctcaccacgatgctgagctcctaccagatcctcagcacctcccaggagctgaaggatacagacctggactatctggagatgtttgtccacgtggccgaggtgatgggcaagcattatgggatggtgccaatccagcatctggacctcttagttcgtgactcatcccaccccaacaaggcagggcaggggcatgtaggcaacatcttccagagattgtctggcagataccccaaggtgcaggagctgctgcaagggaagcgagcccgttgctgcctcttgcctgccccagggaggcggcggatgaaccaaggccatgcaagccctggtgacacagatgatgacttccgccaccttctgggggcctacgtctcagatgtgctgagtgcggccccccagcacgctaagagccgctgccaggggtactggaacgaggggcgcgccgtggccaggggggacagacgcctactcacggggcagcagctagctcaggaaatcaagaacctctcaggatggatggggaggacagggcccggtttcacctctccggatgagatggctgctcagctgcacgacctgaggaaggtggaagctgccaagagggagttcgaggagtatgtgaggcagcaggacgtagccaccaagcgcatattctctgcgctgcgggtcctgccagacaccatgcggaacctcctctccacccagaaagatgccattctggcccgccatggtgtggccttactctgcaaggggagagatcagaccttggaggcactggaagctgagctgcaggccacggccaaggccttcatggactcctacacgatgcgcttctgtggccacctagctgctgtggggggtgctgtgggggccgggctcatgggcctggcagggggcgtggtgggtgctggcatggcagcagctgcactggctgcagaggctgggatggtggctgctggagctgccgtgggggccacaggggccgctgtggttgggggtggcgtgggtgctgggttggctgccacagtgggctgcatggagaaggaggaggatgagaggcttctggaaggggaccgagagccccttctccaggaagagtaacagccccaggaggtattgaaggacaggagagatgtcaggtggggatgaagaagaggggcaggtcgggggagggtgatgccagggattccaaggcaccgccatgtactgcactgccctggtcgaatgctcggtgtctgggtggcagctgagctgggactcaaggtggctcttggaacctgggaggcagcatctgggggcagtggatagaacacccggcctgtttctggttgcagatggttgccgatctgcccttgtcacagataggctacatcccagggtttctggctgcaagtgagactccaccctccccacctggctcatttccccgatgaccctggattgtaggaaagttaagcaggcaccatcctggaagtctacccctaggtggtcgagagacctgttctttcacagatgtgagaagccccaggatgattgaccatggtgttcaggagcggggagcactgatgaggtgctggggatgacaggaaggaaggaacactgggcagaaccagagagatgggacatggtagactgtggcccagaccccagagcagagaaacttgttcccatgacccttcccaaatctgctccagcaggactaaggtggctttcccactcctggcccacagccccagagagcctgtctgtgcatcctgaaccactctttgctgggcctccgcaagggcctctcttgggtctgtgtcctttttcaagcctgtttagatgggggagtgcccatgccctctgtgaagtgcccaaatgcgaaagaataacaccttttcttgcattctgagctaagccagacagcctttatactagattctatcaaaatcttgcaaaggaaaacaaaatgaacaacttctacccttaaacacatcctttctcccctgggcttgtaagaagatgcagcttgatgcagctcctcaaacaccaggccccctgggaactgggggtgcgggagttctccctctgggggacagaaaatctgactactaggaagacttctaggctatgaaactgacttctaggctatgaaacttacagggtatgggtgggcacattatcctttattttatgaaaaataaaatgtgtgtatgtgaaaaaaaaaaaaaaaaaaaaaaaaaa

SEQ ID NO: 1235 - DNA, 168 bp, Homo sapiens
tttcagtgcaccatctgcaaaaaagcctttctgcggagttcagactttgtgaagcatcagagaactcacacgggagagaagccctgtaaatgtgattactgtgggaaaggctttagtgacttctcaggattgcgccaccacgagaaaatccacacaggagagaaaccc

SEQ ID NO: 1236 - DNA, 3140 bp, Homo sapiens
acaagagcagccattgtcccgcgcgcggacgcttgctgtcgccgagcagctcggcccttcagacttaacccccagcggccttgcggatgctgactaggagaggggaccgaactagcttaacccgagtcggccgtgttgcagaatcggggcagggggttgcctaacccgagttcgtcctgccgcagagccgtgctaggcactgaggcggtgacaggcccagcctgggctgcgggccagcggacgcccaggttggtaggggcgtggggcagcgcttggtgtccgatgcgcgcatgcgcagggtctacgcgggaagctggaagcggtgctcaggacctcagcaccctgctgtgcctggaggagagcatggaagagcaggatgagaagcccccagagcccccgaaggcctgtgcacaggattctttccttcctcaagagattatcatcaaagtcgagggagaagacactgggtctctgaccatcccatctcaggaaggagtgaacttcaaaattgtgactgtggacttcacacgggaggaacagggtacttggaaccctgctcagaggaccctggacagagatgtgatcctggagaaccacagggacctagtctcttgggacttggcaactgcagttggaaaaaaagattcaacttcaaagcagaggatttttgatgaagaaccagctaatggagtgaagatagaaaggtttacaagggatgatccttggttatcttcatgtgaagaagtggatgattgtaaagaccagttggagaagcaacaggaaaaacaagagatacttttgcaggaagtggcattcactcaaaggaaagcagttattcatgagagagtctgcaaaagtgatgaaactggggagaagagtggtctgaattccagtctattttcatccccagttatacccataagaaaccattttcataaacatgtatcacatgctaaaaaatggcatcttaatgctgctgtaaacagtcatcagaagattaatgagaatgagacactatatgaaaataatgaatgtggaaaaccccctcagagcattcaccttattcagtttacaagaactcaaacaaaagataaatgctatggatttagtgaccgtattcaatctttttgccatggtacacccctacatatacatgaaaaaattcatggaggaggaaaaacctttgattttaaagaatgtgggcaggttttgaaccccaaaatatcccataatgaacaacagagaattccttttgaagagagtcaatataaatgtagtgaaacctctcatagttcctcccttactcaaaacatgagaaataattctgaagagaaaccttttgaatgtaatcagtgtgggaaatccttcagctggagctcgcatcttgttgcacatcagagaactcacacaggggagaaaccttatgaatgtagtgaatgtggaaaatccttcagccggagctcgcaccttgtttcccatcagagaactcatactggagagaaaccttacaggtgtaatcaatgtgggaaatcctttagccagagttatgtccttgttgtgcatcaaagaactcatactggggagaagccttatgaatgcaatcaatgtggaaagtcattcaggcagagctataaacttattgcacatcaaagaacacataccggagagaagccctatgaatgtaatcaatgtgggaaatcatttatccagagctataaacttattgcacatcaaagaattcatactggggaaaaaccctatgaatgcaatcagtgtgggaaatcctttagtcaaagttataaacttgttgctcatcagagaactcacacaggagaaaaaccctttgaatgtaatcagtgtgggaaatccttcagctggagctctcagcttgttgcacatcaaagaactcacactggagagaaaccgtatgaatgtagtgaatgtggaaaatcttttaaccgcagttctcaccttgttatgcatcagagaattcacactggggaaaaaccgtatgaatgtaatcagtgtgggaaatccttcagccagagttatgttcttgttgtacatcagagaactcatactggagaaaagccctatgaatgcagtcaatgtgggaagtccttcagacagagttcatgccttactcaacatcagagaactcatactggagagaaaccatttgaatgtaatcagtgtggaaaaacatttagcttgagtgctcgacttattgtgcatcaaagaactcatactggagagaaaccctttacatgtattcagtgtggaaaagctttcattaatagctataaacttattaggcatcaggcaactcatactgaagagaaactctatgaatgtaactagtttgtaaatcagctgggatttcttcctttttatttcattcttttaaaaaatttattttaaggtagtacatgtagttggaagaactactataaaaacaatatatgtgggaaaacttccagccctctgttaattgtgtgtctcaaatttgttctggaaaagaaagggggaaagtctatgaacgacttttcaacctggcaattccatatacaatgttaaacttgattcttatgacatattcctatgaaaataataaatactggcacttttccttgcagaaagcactcagacctgaatcagagaaaatcatatgccaaagccaactgccagtgttagacctctttttccataaagagtaaatggaatgctaacactagtgggcttattgagaaaatttaaaggttgctgtagtgtttagaacttaggctggaaaaccatattttagtgcatcattttactacatgatcttccaattagatagcttgtaatctgttccttacagcacttgctgttgttacatgtgaagattttataaattttaggaaagtgtctatgatatatagtgaaaagtgtgggaaaagaatatagaaataatattcacttctaaaaccattatgataaaatatttgtgtatggattagaatagaaagggattatggatgtatctattcaatttctcagtttatgttgggccttcctttttggaatgtacgctgttatgctatgataaatgatataatgagtaaaaattattcaaagccaaaaaaaaaaaaaaaaaaaaa

SEQ ID NO: 1237 - DNA, 1312 bp, Homo sapiens
gcggccgcccgcgagcggggcggtgccacgtacggctccggaagaagcgacggaatctgctagggcacaagagagacgggcgctcgggctctcgcagtcctcttccgtcagtgtcttttgcttcgactcccggcggagcgcgcaacgtggagtgacgtgcaggggccaagtgcaacccaggcagccacggctgtttcggagctcaggactctaaaatggcagagcagctttctccaggaaaggcggtggatcaggtgtgcaccttccttttcaaaaagcctgggcggaaaggggctgctggacgcagaaagcgcccggcctgcgacccagagcccggagaaagcggcagcagtagcgacgaaggctgcactgtggttcgaccggaaaagaagcgggtgacccacaatccaatgatacagaagacccgtgacagtggtaaacagaaggcggcttacggcgacttgagcagcgaagaggaagaggaaaatgagcccgagagtctcggcgtggtttataaatccacccgttcggcgaaacccgtgggaccagaggatatgggagcgacagctgtctatgagctggacacagagaaagagcgcgatgcacaagccatctttgagcgcagccagaagatccaggaggagctgaggggcaaggaggatgacaagatctatcggggaatcaacaattatcagaaatacatgaagcccaaggatacgtctatgggcaatgcctcttccgggatggtgaggaagggccccatccgagcgcccgagcatctacgtgccaccgtgcgctgggattaccagcccgacatctgtaaggactacaaagagactggcttctgcggcttcggagacagctgcaaattcctccatgaccgttcagattacaagcatgggtggcagatcgaacgtgagcttgatgagggtcgctatggtgtctatgaggatgaaaactatgaagtgggaagcgatgatgaggaaataccattcaagtgtttcatctgtcgccagagcttccaaaacccagttgtcaccaagtgcaggcattatttctgcgagagctgtgcactgcagcatttccgcaccaccccgcgctgctatgtctgtgaccagcagaccaatggcgtcttcaatccagcgaaagaattgattgctaaactagagaagcatcgagctacaggagagggtggtgcttccgacttgccagaagaccccgatgaggatgcaattcccattacttaggtttcccataattcttaaatttaaaaaataaacgttttgttcttttggaaaaaaaaaaaaaaaaa

SEQ ID NO: 1238 - DNA, 1381 bp, Homo sapiens
gccacggccgttgggagcctgagactcaaacatggcagcgccaccttctccaggaaggacggccgaccaagcagaccaggtatgcaccttcctcttcaaaaagcctggacggaaaggggctgcaggcctcagaaagcgcccggcctgcgaccccgagcacggagagagcagcagcagcggggacgagggcgacacagtggctcagcccccgcgggtggcaccgaggccccggggcctccacagctggcagaaggcggctcacggcgacaggaggggcgaggaggcggcgcctgagagcctcgacgtggtgtacaggtccacccgctcggcgaagcctgtggggccagaggacatgggggccaccgctgacttcgagcaggacaccgagaaggagcaccatacgccgaccatcctcaagtgcagccagcgggtccaggaggcactgcggggtcgggagcacgaccacatctaccggggaatccacagctacctgaggtacctgaagcccaaggacacgtccatgggcaactcctcctcggggatggcgaggaagggccccatacgtgcgccagggcatctgcgcgccactgtgcgctgggattaccagcctgacatctgcaaggactacaaggagactggcttctgtggcttcggggacagctgcaaattcctccacgaccgttccgattacaagctcgggtgggagattgaacgggagcttgaagagggtcgctactgtatctgcgaggacgaaaaccatgaagtgggaagcgaggaagaggaaataccattcaggtgtttcatatgtcgccaggccttccaaaacccagtcgtcaccaagtgcaggcattatttctgcgagagctgcgcgctggagcacttccgggccaccccgcgctgctacatctgtgaccagccaaccggcggcatctttaaccccgccaaagaactgatggcgaaactgcaaaagcttcaggctgcagaaggaaaaaagagataagaaagactcaagtctgtatgtacactggggagaagcagcctgttgagtaagatgagagagatgacagtcttcctgcaatcccatgcctgagtatgtaaccaaaagaattgaaatccggatctcaaagaggtatgtgcactcccatgttcactgcagaattatttgcaaaagccaagaggtgtaaacaacccaagtgtccatggatggatgaatggacaaacaaaatgcgatacacacacacaatggaatgctattaagccttaacgggaaggaaatccttttaaagatttaaactgatccttttaaggatcacatgctacaactagaatgaaccttgaagacgacactgctaagtgaaataaactagtcacaaaatgaaaa

SEQ ID NO: 1239 - DNA, 2678 bp, Homo sapiens
gaatcggtgactttcaaggatgtgatagtggactttacccaggaagaatggaaacagctggaccctggccagagagatttgttcagggatgtgacattggaaaattatacacacctggtctctataggactccaagtttctaaacctgatgtgatttcccagttagagcaagggacagagccatggatcatggagccaagcattccagtaggtacctgtgcagactgggagacaagacttgaaaatagtgtgtcagccccagagcctgacatttctgaagaagagctatctccagaggtaatagtggaaaaacacaaaagagatgattcttggagttccaacttgctagaaagttgggaatatgaaggcagtttagagagacagcaggcaaaccaacagacactgccaaaggaaataaaggtaaccgaaaagacaatacccagttgggaaaaaggccctgtaaataatgaatttgggaaaagtgtcaatgtgagttcaaaccttgtaacacaagaaccatctccagaagagacctctactaaaagaagcatcaaacagaattcaaacccagttaaaaaagagaaatcttgtaagtgcaatgaatgtgggaaagcctttagttattgttcagctcttattcgccatcagagaacacatactggagaaaaaccctacaaatgtaatgaatgtgaaaaagccttcagccggagtgaaaaccttataaaccatcaaagaattcatactggagataaaccatataaatgtgatcagtgtggaaaaggcttcattgagggtccatctcttactcgacatcaaagaattcatactggagaaaaaccatataaatgtgatgaatgtgggaaagcctttagtcagaggacccatcttgttcagcatcagagaattcatactggcgagaagccatacacttgtaatgagtgtggaaaagcctttagccagagaggccactttatggaacatcagaaaattcatacgggaggaaaaccttttaaatgtgatgaatgtgataaaaccttcaccaggagcacacaccttactccacatccaaaaattcatactggagaaaaaacctataaatgtaatgaatgtggaaaggccttcaacgggccctcaacttttatccgtcatcatatgattcatactggtgaaaaaccgtacgaatgcaatgaatgtgggaaagccttcagccagcactcaaacctcactcagcatcaaaaaactcatactggggagaaaccctatgattgtgcagaatgtggaaaatcttttagttactggtcatcccttgctcaacacctgaaaattcatactggagaaaaaccttacaaatgcaatgaatgtggaaaggccttcagttactgctcatcccttactcaacatcggagaattcacactggagaaaaaccctttgaatgcagtgaatgtggaaaggctttcagttatctctcaaaccttaatcagcatcagaaaactcatactggagagaaagcttatgaatgtgaagaatgtgggaaagcttttattcggagttcatctcttgctcagcatcagagaattcatactggagagaaaccctatcagtgtcatgaatgtgggaaaaccttcagttatggttcatcccttattcagcataggaagatccatactggagaacgaccttacaagtgtaatgagtgtgggagagcattcaaccagaacatacaccttacacagcataagagaattcatacaggagccaagccttatgagtgtgctgagtgtggtaaagcctttcgacattgttcatctcttgctcaacatcaaaaaactcacacagaagaaaaaccctaccagtgtaataaatgtgaaaagacctttagccagagctcccatctaactcagcatcaacgaattcacactggggagaagccctataagtgcaatgaatgtgacaaagcctttagccggagcactcatctgactgaacatcagaatactcatactggagagaaaccttataactgtaatgaatgcagaaagacttttagccagagcacatatctcattcagcaccagagaattcattcaggagagaagccttttggatgtaatgattgtggaaaatccttcagatatcgctctgctctcaacaaacatcagaaactgcatcctggcatatgacaattctaggaacatcataaatttaggggagatatttactttagtttgtccttttgttaagtactgaagaatcagagtggatttagaaactgccttgaaatcttttaaattttcactatcatgttatggaatggaaagtacattgggctgaactaatccaattgttattaagccactctgtgacattagaaaactctactgttttaagctttagtttcctttatggaatgaaggctttggagtagattatttcaaaggtagtttggagttttataatcagttttgtatatttacaatattttcttgaatgggtttactatacatcagcattttgctgtgttgcatctagaatgtgtatgtttatgcatgttttgccaatagaatttgtgcttcagtaactagatcggggatctagtatgctcctggtctaatgcatttacattgtttaggtaactggttcctaataaaaagaattataaaataaaaaaaaaaaaaaa

SEQ ID NO: 1240 - DNA, 4312 bp, Homo sapiens
ctgaatcaagtgagaggagagctgcggagcaatcaccatgagtatctcagctcttggaggccgcaccaaagggaagcctctgccaccaggcgaggaggagcgcaataacgttctcaagcagatgaaagtgcgaaccacgctgaagggggacaagagctggattaccaagcaggatgaatcggagggtcgcaccatagagctgccctcaggccggagtcgcgccacatccttttcatcagctggggaggttccgaagcctaggcctccgagcacaagggctcccactggctacatcatccggggagtgttcaccaagcccatagacagctcttcccagccccagcagcagttccccaaggccaacgggactccaaaaagtgctgccagtctggtgagaacagctaacgctggtcctccccgcccctcctcctctggctacaagatgaccactgaggattacaagaagctggcaccctacaatatcaggcgcagctctacatcaggggacaccgaggaggaggaggaggaggaggtggtgccattctcctcagatgaacagaaacggaggtcagaggctgcaagcggtgttctgaggaggacagctccccgggagcactcctacgtcctgtcagcggccaagaagagcactggtcctacccaggagacacaggcaccgtttatcgcgaagagggtggaggtggtggaagaggacgggccttctgagaagagccaggacccacctgctctggcaagatccactcctggctcaaacagtgcggatggaggcaggaccaaagcgtctcgggcaatttggatcgagtgcctgccaagtatgcctagccccgctgggagccaggagctcagctcaagaggtgaggaaattgtccgcctgcagatcctgacacccagggcaggactccgcctggtggccccagacgtggaaggcatgaggtcttccccaggcaacaaagacaaggaggccccctgctccagagagctccagagggacttggctggtgaggaggctttcagggcccccaacacagatgctgcaaggtcaagtgcacagttgagtgatggcaatgtgggatccggagccacgggctcccggcctgaaggcttggctgcagtagacatcggctccgagagaggaagctccagtgccacttcagtctctgctgtccctgctgataggaagagcaacagcacagcagcccaggaggatgcaaaggcagacccaaagggggccttggctgattatgaggggaaggatgtggccaccagggtcggagaggcctggcaggagaggcctggagctccaagaggtggccaaggagacccagctgtacccgctcagcaacctgcagatcccagcaccccagagcggcagagcagccccagcggatctgagcaacttgtcagacgagagagttgtggcagcagcgtgttgactgattttgaggggaaggatgtggccaccaaggtcggagaggcctggcaggacaggcctggagccccaagaggtggccaaggagacccagctgtacccactcagcaacctgcagatcccagtaccccagaacagcagaacagccccagcggatctgagcaattcgtcagacgagagagctgcaccagcagggtgaggagcccctcgagctgcatggtcactgttactgtcactgccacatctgagcagcctcacatttatattccagcccccgcaagtgaattggactccagctctaccaccaaagggattctcttcgtgaaggagtacgtgaatgctagtgaagtgtcttctgggaagccagtatctgcacgctatagcaacgtcagcagcattgaggactcattcgccatggagaagaagcctccatgtggcagcactccatactctgagaggacaactggagggatctgtacttactgcaaccgtgagatccgagactgtccaaagattaccctagaacatcttggtatctgctgccatgaatattgctttaagtgtgggatttgcagtaaaccgatgggcgatctcctggatcagatcttcattcaccgtgacaccattcactgtgggaaatgctatgagaagctcttctagcgaccccccaccgccaggctgatcagaagctgatgactcgtggacaaatttggctgtccccagttttgccccaagttgctgtctccccttccctcacctcctccctccctgtttgatttcttcatgcttttgcccttctcaagttgaagttgcatacatccaatatcgtatcttaatgatgctatgataattgcttgtgtgtgtagcttcttgtagcttagaaagcgctttatgcccatgatgtcatttcaggctcaaccaaagaggatcaaacaggaattccatcttggcttccctaagacagattggctttctaatgagtttaagtgggcagaagtgtagggttcagtgtgtcctgactcccttgaggcttataatgggccaagttgaagactgttgatgatccctggtgggtaaattgcagacatcaaatgctagggattggcataggctagtgtttagcttgtctatttgccatatctattttttttaaatttccatacacttgtaaaagtagttagttgcttttgattgagttatatagcagtttttcatttggtcttccactcacctttcactatatttgagtgttcccttacaggtatgttggcatgtgttggaaaatttacacaattaggtttaaattcagtaggatgtgattttaggatgctactgatcaaagtgatatctgtgtctgttggaatcttgatagctgattaatttgccctcaattctgctccctgaacttcacacataaatcttcccaagtgggttttagggtgtatagatcccagcaggattaaggaggtggaaaagcagctaacatttcttgaggctctaccacatagcaggcactgtcacagagtaatggcattaatccccataataatcctgtgaaggtgatattctcatcccatcttagacatgaggatattggaactcagagaggtggctattgcattgcgcagaacgctacagagcccatgctcttcccagagcagcacccacaaaagcaagcattgattttgtgctcagtgtgtgccaagcactgtgcagagggtacacagttcctgccaggttaacaccctcccttcaggcctcccaaaggcataggcttgcaaagagcagaaggtgtgaaatcacactcttcctctgggcatcctggatccctgaattatccccccccccatgaagtacttcaagggccaagctgcccctttccctcctctccgcccatgaaaatgcctccaaactgagatgctttcagctgagaacagatttgactcacagacattaccaaagaggagcttgtgaatccaggaaaagctccagggggctagctgatctgagcagagagctttcagtgacccattttcctgtctagactctgccttaagctagtggcaactgctggggccccaggtacttgggacatggaaactcgttggatggctgggcagatgtaagcctgtccatgcagtcagccgatcctctgctcaggttcagctggactctgccatctgtgggcccagcatcactctgtaagttccttgaaaggaagaacaaccttagagtatttctgatacaaaatgagggcctctgctcttgatttaattataaaatgtctacgtctttctccagtttctgagccctatgcacattggcttgtgggcttgttcttcctgccaaatgatcagagaggaacattccatttatttgtagtggatttcctctggagggcatgtacccacactaaataccaactgctcttcctcagctgtagtccccaacatcagacttggcacgtggtggacactaacacacaggcactcaatgaatgagtgaaggaaataaaagtcaccccgttggtgagaggtgctatccctgagtctcagtgcaggaccagtggatgaaaggcaaggtaaagaggcccaagataggctggcttcccccgttcaaggtatagtctgcctttaagggagttttagaaccaacatgcaagacattgaaagaaatcttgcaagagccattattgacttagatccaaaacagcctctctcatgtctaaaaaggcacagaattttgcagatctgaggaagagggatgcattacctttttgcttcttttcaattgcttagtgtttctaatcatacttaatccacactaatgtgcgcaattataataaatggtaagatatcacatgtg

SEQ ID NO: 1241 - DNA, 1658 bp, Homo sapiens
cggctccgggagctctgtcaacagtggctacagcccgagacccataccaaggagcagatcctggagctgctggtgctggagcagtttctgatcatcctgcctaaggagctccaggcccgggtgcaggagcatcacccagagagcagggaggacgtggttgttgttctggaggatttgcagctggatcttggagaaacaggacaacaggacccagaccagccaaagaaacaaaaaatacttgtggaggagatggcccctctgaaaggagtacaggaacagcaggttcggcatgagtgtgaagttacaaagcctgagaaagagaagggtgaggagacaaggattgagaatgggaagcttattgtagtaacagactcttgtggaagagtagagtcatctgggaaaatatctgaacccatggaggctcataatgagggctctaacttggaaaggcatcaggccaagcccaaagagaagattgagtataaatgctcagaacgtgagcagagattcatccagcacttggacctgattgaacatgcgagtacacacacgggaaagaaatcctgcgagtctgatgtgtgtcagagttccagtcttacaggacataagaaagtcctctctagagagaaaggtcatcagtgtcatgagtgtgggaaagcctttcagaggagttcacacctcgtcagacatcagaaaatccatcttggtgagaagccttatcagtgcaatgagtgtggcaaagtctttagccagaatgcaggccttttggaacatctcagaattcatactggagagaaaccttatctatgtatccattgtggaaaaaattttaggcgcagctctcaccttaatcgacatcagagaattcacagtcaggaggagccctgtgagtgcaaggagtgtggaaaaacctttagtcaggccttactcctcacccaccatcagagaatccatagtcactccaaaagccatcaatgtaacgagtgtggaaaagctttcagtttgacctcagaccttattcgacaccacagaattcatactggagaaaaacctttcaagtgtaacatatgccagaaagccttccgactaaactcacaccttgctcagcatgtaagaatccacaatgaagaaaaaccctatcagtgtagtgaatgtggagaagccttcaggcaaaggtcaggtctttttcaacatcagagatatcaccacaaagacaaactggcttgatgaggtgttctctccttgtagaacatcagagaaggcacattgactagcaaacagcactttaggaaaagtcaccgtagcccactgtgggatcagaaaattcttgggggctgagttggaggctccctgcctctattctctctcctttgctttccttgaagtcagctttggaccacaataatttcactgtagatgatatgctaggatcaaagttaaacagcattcttcactgcaggacatctcagagcatgtaacataactgcatgattatatactctaagcaatagagagcttcatgactgagtaagagttttgaagtcagcagtgaatcaagtgacagatttgcaggcttaagcagaacaagggaagattgatatttttggatatgctatagcagctttctcctatgaaataaaactgatgatgtttggaag

SEQ ID NO: 1242 - DNA, 3186 bp, Homo sapiens
ggaactggcagcggggaggaggctctagcgaggcctgaaaggctgcgtaaccaggcaggagtaggggttggggttcggggttgggggacagccagggatcgcgtctgatatgctgttggggtcgtgaccgtctgggggccgaggcaggcactggccagacccagccagggatcctcgtattcgtcgagcctaatttccagcagccgggtaggcctcaccagaggctcctttccgtgaggccgcccccaattcctgcccctattctctgcctgggagatggcttccccgagccccccgccggagtcgaaggggttgctgacatttgaggatgtggctgtgttttttacccaggaggagtgggattatctggacccagctcagagaagcctgtataaagatgtcatgatggagaattatggaaacctggtctcactggatgttttgaacagagataaggatgaggagccaactgtaaaacaagagattgaagaaattgaggaagaagtggaaccacagggtgtaatagttacaagaatcaaaagtgaaattgaccaggatcctatgggtagagaaacatttgaacttgttggtaggttagataaacaaagagggatcttcctatgggaaataccaagggaatctttgacccaggaacagagaatgttcagagaaaacactaacattatccgtaaaagaccaaactcagaagagaaatgccataaatgtgaagaatgtggaaagggttttgtccgcaaggcccatttcattcaacatcaaagggtccatactggtgagaaaccttttcagtgcaatgaatgtgggaaaagttttagtcgcagttcatttgttattgaacatcagagaattcacactggggaaaggccctatgagtgtaattactgtggaaaaacctttagtgtgagctcaacccttattagacatcagagaatccacactggagaaagaccctatcagtgtaatcagtgtaaacagagcttcagccagagaaggagccttgttaaacatcaaaggattcatacaggtgagaaaccccataaatgtagtgactgtgggaaagccttcagttggaaatcacaccttattgagcatcaaagaactcacactggtgagaaaccttatcactgtaccaaatgtaagaagagctttagtcgaaattcattgcttgttgagcatcaaagaattcacactggggaaagaccccataaatgtggtgaatgtgggaaagcctttcgattaagcacataccttatacaacaccaaaaaattcacactggcgagaagccttttctttgtattgagtgtggaaaaagtttcagtcggagctcattccttattgaacatcagaggatccatactggtgaaagaccttatcagtgcaaagagtgtgggaaaagtttcagtcagctttgcaaccttactcgtcatcagagaattcacacaggagacaagccccataaatgtgaggaatgtggaaaagcctttagtagaagctcaggtcttattcagcatcagagaattcacaccagggagaagacttatccatacaatgaaactaaggaaagttttgatccaaattgcagtcttgttatacagcaggaagtctaccctaaggagaaatcttataaatgtgatgaatgtgggaaaacttttagtgttagtgctcatcttgtacaacatcaaagaatccacactggtgaaaagccctatctatgtactgtctgtgggaaaagcttcagccggagctcatttcttattgaacatcagagaatccacactggtgagagaccctatctgtgcagacagtgtggaaaaagctttagtcagctttgtaatcttattcgacatcagggtgttcacacaggtaataaaccccataaatgtgatgaatgtggaaaggcctttagccggaactcgggtcttattcagcatcagagaatacacacaggagagaaaccttataagtgtgagaagtgcgacaaaagtttcagtcaacagcgcagtcttgtcaaccatcagaagatccatgcagaggtgaaaacccaagaaacccatgaatgtgacgcttgtggtgaagcctttaattgccgtatttctcttattcagcatcagaaattgcacacagcatggatgcaataaatgtagagcaatacataagctcaatttgatttgagactagtacccaagtgcagttttagtatggctcaacatgggtcagatttagtgataaagcaaattctccttggcctcaggcaaatagtttctaaagattctgtgaatagtggacaactgcccatgagcatttgacttcccttactctttgatgatcgtagagaaagacttggtaatttatctaagtatctttaataaatctttcagcagagagattaaacctaggttcagagcatgggtgctctgagggacaaagttggattagtataagggagctggagcagctgatagtggaaaacagaataatgattcaaagagtcttctgtcaccatgtcatattgtggttctttcagttccatgatatgtttggctctgcatgccaaagtccagtgattaagcatatataagttgtcaaggaaacaaagcccaaatgtttttaaaacaagtatacagtttttgtcattgtttaagaaagccagttgtttggcatgtgagttaaaggcagttccaatgcctgatggttcccagatctatgaaatgagtggaccattaaccttacatgtaaagattatgttagtaattaagaaacctaacaaaggtgttaccaaggaacctttgggagtgccttttttgtttttcaagatggacccaaaaaagtggaggaagatattgttcttttgtgccctcctacctgtgagagatatttgtagtcctatgtgaatgagcttatccctccacaaccaggtgcatatgaaagtgtacatattatgactgccaagtattggaaatgaaaagacctggagtctatgctaggaagctgagatattttggtattgcattggtttttatggtaactaggttttgcatgcaattaaaaatccttatttcttgttctagggcttcccttagttaatggttattataaacctattaattcatctgttttaaccattaaaacctgttttgtttttagctttgaaaaaaaaaaaaaaaaaa

SEQ ID NO: 1243 - DNA, 2743 bp, Homo sapiens
acaagcgtgacgcacttccggcctcctaaccgttctcgctagcggtgcgcttctggcctgttttgagtccgcgctcaaaggtctctgaggatccccgggtggaaactcctcccgggagtaaaaccacacaaccactgagaagaccgctccggcatcctagagagtacgcgtgtgagcctgggtgcaaggccaaagtagtgacgcacttccgttcacgcaccgctttctgtttttcctgagcctttgcctgctaagagggagaccaggtcatggcagccatgcctctgaaagctcaataccaggagatggtgaccttcgaggatgtggctgtgcacttcaccaagacagaatggactggcctttctcctgcccagagggccctgtacagaagtgtgatgttggagaattttgggaacctgactgctttggggtacccagttcccaaacctgcactgatctcacttttggagagaggggacatggcttggggcctggaagcacaggatgatcccccagcagagaggaccaaaaacgtctgtaaagatgttgagaccaacattgacagtgagtccacattaatccagggaatttctgaagaaagagatgggatgatgtcacatggtcagctgaagagtgtccctcagagaactgacttcccagaaacacgtaatgtggaaaagcaccaggacatccccacagtgaaaaatatccaaggaaaggttccaagaatcccctgtgcaaggaaacctttcatatgtgaggagtgtgggaaatccttcagctacttttcttactatgctagacaccagagaatccacactggggagaaaccttttgagtgtagtgagtgtggaaaagcctttaatggtaattcttcgttaattcggcaccagaggattcacactggagagagaccctatcagtgtgaggagtgtgggcgagcctttaatgataatgcaaatctgatcaggcatcagagaatccacagtggggacagaccctattactgtacagagtgtgggaatagtttcacgagtagttccgagtttgttatacatcagagaatccacactggggagaaaccctatgagtgtaatgagtgtggcaaagcttttgttggtaattcacccctacttcggcatcagaaaatccacactggagagaaaccctatgagtgtaatgagtgtggcaaaagctttggaaggacttcccatctaagccaacatcagcgtattcacacaggggaaaagccttattcttgtaaagtatgtggacaagccttcaattttcatacaaaactaactcggcaccagagaattcacagtgaggagaaaccctttgactgtgtagattgtggaaaagccttcagtgctcaggaacaattaaaaaggcatctgagaattcatactcaggagtcttcctatgtatgtgatgagtgtggaaaagccttgactagcaaaagaaatcttcatcagcatcaaagaatccatactggagagaaaccctatgagtgtagcaagtatgagaaggcctttgggacttcttcccagctaggtcaccttgagcatgtctactctggagagaagcctgtgctggacatttgtcgttttggcctcccagaattttttacccccttttactggtaatagtacactccagtgaaatgtactgagtggattccgtcttctactcaggaatggaatgtgtgacacaggcctgactcagcctctgatccatccctcaagccacagttaatgattcagatgtcagtagatgaccaaagatggttcaattagagtcccaggattgcaagagctaataggaacaaatactctccccccgcccacccccattggttttaatgctgagaagaagaactagactcttacagaggtgagaatgaagtccacacagcaaaaatgcatctgagaattggagagcagtaaaagactgaagataatgtttgaacagccacatacaccatgcctgaagctaaaaatatatacgggtttttgaattgcagcagccaataaattccatttttgtttggttggttttggctttggcacacctgagttaggttttcttgccttggaacagaattttgacttaaacagtgttgtcattgtagcagttgtttgaagttttcagggataacatacctgatggagaaatgttttgtgtgtatgatatatgggaaagtctttagttatagtcatggcagctcctcaaccccatgattgtgatgagattgggaagcccactgtaacactggagagcccaggttatatcagacaccactagtagatagaagttctaacaacttgagctctgtaacaaaaatctcattgtactacaaaattatgtctgcaccagtgaatccattctcaagaaaagtcttaactaggaaactaaaagctttcactcttaaagctttcattttctgtttattcagttttttatttggaatggatgctactctaggccttaaactgagaaatgccaggctattgtagctattatatcttggtatttgccattttaattcctaggacagcacgcccgctttgcccttgacctggctagggagccaaggaaatgccatggttcttggtcataagacacactgcagagatctctcagtaggaaaacagggctggcccttttctttggtgatgaacacaaactgcaccctttttttctcccacgtgtccttccgctgccagccagtgttggaatctcc

SEQ ID NO: 1244 - DNA, 5362 bp, Homo sapiens
gctttcatcgcctttactccccgaccttccttcgagtctgtttatccgttgcagcctcccttccccacgacggggcgcctctgcaactcacaaagtacccttagaaagaggccctcagaagagtcttctcttaagaagataaagaaggtagtggaaacgaacttcctgagcttttcaggctctaatggctgaagaatcaagaaagccttcagccccatccccaccagaccagactcctgaagaggatcttgtaatcgtcaaggtagaggaggatcatggttgggaccaggaatctagtctgcatgaaagtaaccctcttggccaagaagtgttccgcctgcgcttcaggcagttacgctaccaggagacactaggaccccgagaagctctgatccaactacgggccctttgccatcagtggctgaggccagatttgaacaccaaggaacagatcctggagctgctggtgctggagcagttcttgaccatcctacctgaggagctccagacactggttaaggaacatcagctagagaacggagaggaggtggtgaccctattagaggatttggaaaggcagattgatatactaggacgaccagtctcagctcgcgtacatggacatagggtactctgggaggaggtagtacattcagcatctgcaccagagcctccaaatactcagctccaatctgaggcaacccaacataaatctccagtgccccaagagtcacaagagagagccatgtctacttcccagagtcctactcgttcccagaaaggaagttctggagaccaggaaatgacagctacacttctcacagcagggttccagactttggagaagattgaagacatggctgtgtcccttattcgagaggagtggcttcttgatccatcacagaaggatctgtgtagagataacaggccagaaaatttcagaaacatgttctccctgggtggtgagaccaggagtgagaacagggaattagcttcaaaacaggtaatatctactggaatccagccacatggagagacagctgccaaatgcaacggggatgttatcaggggtcttgagcatgaagaagcccgagaccttctgggcagattagagaggcagcggggaaatcccacacaagagagacgacataaatgtgatgaatgtgggaaaagctttgctcagagctcaggccttgttcgccactggagaatccacactggggagaaaccctatcagtgtaatgtgtgtggtaaagccttcagttacaggtcagcccttctttcacatcaggatatccacaacaaagtaaaacgctatcactgtaaggagtgtggcaaagccttcagtcagaacacaggcctgattctgcaccagagaatccacactggggagaagccatatcagtgcaatcagtgtgggaaggctttcagtcagagtgcgggccttattctgcaccagagaatccacagtggagagagaccctatgaatgtaatgagtgtgggaaagctttcagtcatagctcacacctcattggacatcagagaatccacactggggagaagccctatgagtgtgatgagtgtgggaaaaccttcaggcggagctcacatcttattggtcatcagaggagccacactggggagaaaccctacaaatgcaatgagtgtgggagggccttcagtcagaagtcaggccttattgaacatcagagaatccacactggagaaagaccctataaatgtaaagaatgtgggaaagctttcaatgggaacactggtctcattcaacacctgagaattcacacaggggagaagccctaccaatgtaatgagtgtgggaaagcctttattcagaggtcaagtctcattcgacatcagagaatccacagtggtgaaaaatctgaatccataagcgtttaggaacaacatcagttagagtttgagcattattcagcattagggaaaccacacactggtgagaggtctttcagtgtactaaaaggcagaaaggtcatcacaactttagtgtcagaatctatagtggtggcaaagttaggatagctctttagtaatttgggcccagtgccttggtgaaggttgattagcttgactgtctttgaaagtatctgatggagctcctgatgacctaatgtatcctttagaaatttaaaatagcattagagcaagttgcttgtcatggcttgaagagcttaactttgtcttttgggtgagtagctataggtttgagagaggctggctactcctagttcctgtgcttcttcccatctcctgtgatccccctctcccatttattcccttgaaggtgcccttgtattcctaatctgatctaagaagctgctgtagagtcagaagtagcttctgtgtgaaacttatatttgtatgtagctttctaggaaaattttacagacacttaaagtatttatgcttaagtgtgcatttttttattctaatattccttctagtcagtggaaatttgtattcccatacaaactcagaatgctatatttttaacagcactccagcatttttcttcatgtatcaccttcactgactccattgagtcattgagcatctgtacatatccttcaccacccccagtcccagcacctgtgtcagtaaagaaagtggacacattagtaatggttatgggagtaatacagagaaagaggtgagtggagactcagcccagctgctcttgagcttggatagttatacattttggtgacttctgactctccttccacctccccactgtacactgtggtacagatagttggcactatcctagttatggcatcaggtaggagaaggagacgaagatgctttaggaagataaaaaccttacaaagaatgtatactcatcttttttggcccattacaatactgctttctcaggttcttaacagcctgtgcaaactccctgactagatggtctgtcactcctatcattaccttgcacccatctctttagatggcctcagcacctcactcgttattctccatctgtttcttgccattagtttatatgactttaatatccacagtggtaatctaataccttacctcacaggttttcattcttttgaactctggtgcactccatctgtaatccatgtctataatctaccaacaaagatgtactcttaaactcagtatcaccaggcactatatttcatctttgaggcttttgttataccaaggaatactatataaagtaatgagactggtttaaagtaacatgccagaacttacgcatccaatgtgggttgtcacttgttattcccaagtactattattccatactactatattcttccaaatatttggaacactcttagaattcccatttaataaaccatatgagaaaaccctctattactcttacactttagttttaccatttgagtagccacttattcaccagagttggaattgagaaattttgggctttccaaaattaacctttaaacttaaaattgattacattgagcctattcagaaaaaaaattatataggttctgatgaaagcttcataatttcaccctgtgactatcctgaaaagaaataataatcattttatgattgatgggccaaaaaaagcaatcaaagtcttacgtcatagaggaccaccttttggatcataaattctttccctataacattccttctctgcctctctatggcccactttgaccactaacaacatcagaattatctacatcaatttcattgagccattggtgaatgaagacacccatcacttgtcatgttggtttccaacagtcctttcgattatcctttattttcttatcctcccttctcttgtttcttttatttataagttaccattcctagtttctttgtacttgaaattttaagaaaccagaaacaagtaaatctggttgtatctagatctttgctctgtgtttcagttgtgccttaccctctgtaagatactgattcttcctggggccagtattaccttgtatgcaaatattacatatgatgggtgcattgtcagagggaaaatatatgtgtatgtacacatgtgtatgtacacacacacacacacctgccatacactttagaagaacgcttctcttctattccaataaaaagtccttttagcaatgcaacatattaacaaaattgggtgcattcagggtggtatggccatagaccagagcaacacattgaaatgtatacagatgtactagctaaagtctctttatgtgtcagtattaagagtaatatgtagccagattacttaaatctcagaattactaagcatgtggcataaatttggagaaaataatatgactagaaaaattagtgttatattgggtgtgagaaaagactgtgtcttgaaagaattatcaaagctgatacagcacatatacagaattagccaaatggtataagacaatagaaaaaggctgtggattctttgaggacatcactagaaatcattctttgtctcaagttcacactcttagcatagaatattattgactaggctgtatgacattttgagctcttaactgtgaatggcattcattaagctcctttatcctatagattctatctttatgttcatctgaaatgaactattcatcagtactttctcctcccatcctaagcttctcattttaggaactgacatgataaggtggttctttcataactctaatgccatccaacatagccctgggagaggcatgttaggtttcagagattttctccatggagcaaggtgcagtgctagaatatggtggttgattcccaaacagagcagttaactttactcttggttctgagtctccaaataataatagccgacgtttattgagcacttactatgtgcccaaccctgttatgcctttctcaggctcatgataaatgtattagtctgttctcatgctgctattaaagacatacctgacactgggtaatttataaaggaaagaggtttaatggactcagttccacatggctggggacgcctcacaatcatggtggaaggcaaggaggagcaaatcatgtcttatacatggatggcagcaggcaaagagagaacttgtgcaggggaactctttataaaaccgtccgatcttgtgagacttattcactatcacaagaacagcacaggaaagttctgcccccgtgattcaattacctcccacttggtcccacccacgacacgtgggaattgtgggagctacaattcaagatgagatttggatgggacacagccaaaccatatcaataggtattattttatcccccattttataaatgaggaaacggaggcttagttgagtgagctgaccaatatcaccc

SEQ ID NO: 1245 - DNA, 1667 bp, Homo sapiens
gggcattgttcgtgccgcgcttctagcaacgccgggccggtaaccccctctccctccttgcgcgttccgggtctcgcaagcgcctccaaggtttgtcttgaagcatagctccagctggagggtaccttttaagctgttcaaggtcaagatgaatacaaactcaaaggaggttttatccctgggtgttcaagttcccgaggcatgggaagaacttctgacaatgaaagtggaagcaaaaagtcaccttcaatggcaggaatccagactgaaacgcagtaatccactggcaagggaaatcttccgaaggcactttcgacagctgtgctaccaagagacccctggaccaagggaggctcttactcgactccaggaactttgctaccagtggttgaggccacatgtgagcacaaaggagcagattttggatctgctggtgctggagcagtttctatccattctgcccaaggagctccagggctgggtgagggaacactgtccagagagtggagaagaggctgtgattttgctggaggatctggagagagagctcgatgaaccacaacatgagatggtggcccacagacacagacaagaagtcctctgtaaagagatggtgcctctagcagagcagacaccactgacccttcagtcccagcctaaggagccacagctcacatgtgactctgctcagaagtgccattctattggagagacagatgaagtaaccaagactgaggacagagagttggtgctaaggaaagactgtcctaagatagtggaaccacatgggaaaatgtttaatgagcagacctgggaggtatcacagcaggatccctcacatggagaagttggtgaacataaggataggatagagaggcagtggggaaacctcttaggagaggggcaacacaaatgtgatgaatgtgggaagagctttactcagagctcaggtctcattcgacatcaaagaattcatactggagaaagaccttatgaatgtaatgaatgtgggaaagccttcagtcgaagttctggtctttttaatcaccgaggaatccacaatatacagaaacggtaccactgcaaggagtgtgggaaggtcttcagtcagagtgcgggtcttatccagcatcagagaatccacaaaggagaaaagccgtatcagtgcagccagtgcagtaagagctacagtcggcgttcatttctcattgaacatcagagaagccacacaggggagcgacctcaccagtgcattgaatgtgggaaaagctttaatcgacactgcaacctcattcgccatcagaagatccacacagtggctgagctggtctagggcttggctatgagcaagttttccagatcaccacccaagttgtgtggggcaggttgagactagaaaatgcctctttcttcctttctccatgaaatgtgtttgaaacaaatcctgacttaaggcccagggacttccttaaaggaaagttgggtgtttgaagctactgttttctcttttgttcattttacctctttcttactcttactagctgtgtccctcttatttataatttatttatttttttgagatggctgctaaacccttctaataatataataaatggcactgccacagccaacatgcccaaaaaaaaaaaaaaaaaaaaaaaaaaaaa

SEQ ID NO: 1246 - DNA, 2189 bp, Homo sapiens
aatcaggcacatgtctggagaggagaggacggcttccgggatctagcggggcctttgtcccgacagagctccacttcctgtccccgcggctctgtgtcccctgctagccgtaggtcgtgtgacccgcaggcaccgggagatccagaagtgaaacgccaggctctctggaggccaggagatgactctgttgacgttcagggatgtggccatagaattctccctggaggagtggaaatgcctggacctcgctcagcagaatttgtacagggatgtgatgttggagaactacagaaacttgttctccgttggtctcactgtctgtaagccaggcctgatcacctgcctggagcaacgaaaagagccctggaatgtgaagagacaggaggcagcagacggacatccagctatgtcttctcattttacccaagaccttctgccagagcagggcatacaagatgcattcccaaaaagaatactgagaggatatggaaattgtggccttgataatttatatttaaggaaagactgggaaagtttagatgagtgtaagttgcaaaaagattataatggacttaaccaatgttcatcaactacccatagcaaaatctttcaatataataaatatgttaaaatctttgataacttttcaaatttacatagacgtaatataagtaatactggagagaaacctttcaaatgtcaagaatgtggcaaatcctttcaaatgctctcattcctaactgaacatcagaaaattcacactggaaaaaaattccaaaaatgtggagaatgtggcaaaacctttatccagtgctcacactttactgaacctgagaacattgacactggagagaaaccttacaagtgtcaagaatgtaacaacgtcattaaaacttgctcagtccttactaaaaatagaatttatgccggaggggaacattacagatgtgaagaatttggcaaagtatttaaccagtgctcccaccttactgaacatgagcatggtactgaggaaaaaccctgcaaatatgaagagtgcagcagtgtctttatctcttgctcaagcctttctaatcaacagatgattcttgctggagagaagctctccaaatgtgaaacatggtacaaaggttttaaccacagcccaaatccttccaaacaccagagaaatgagattggagggaaacctttcaaatgtgaggaatgtgacagcatcttcaagtggttctcagaccttactaaacataagagaattcacactggtgagaaaccatacaaatgtgacgaatgtgggaaagcctatacacagtcctcacacctcagtgaacacaggaggattcacaccggagagaaaccctaccaatgtgaagaatgtgggaaggtcttcagaacttgctcaagcctttctaaccataagagaactcattctgaagaaaaaccctacacgtgtgaagaatgtggcaacatctttaagcagttatcagacctcactaagcataagaaaacccatactggagagaagccctacaaatgtgacgaatgtggaaaaaactttacccagtcctccaaccttattgtacataagagaattcatactggagagaaaccctacaagtgtgaagaatgtggcagagtcttcatgtggttctcagacattaccaaacataagaaaacccatactggagagaaaccctacaaatgtgacgaatgtggaaaaaactttacccagtcctcaaaccttattgtacataagagaattcatactggagagaaaccctacaagtgtgaaaagtgtggcaaagccttcacccagttctcacacctgactgtacatgaaagcattcatacttgagaaaaaaataaacaaatataaaaataggcaaagccgttagtatctgctcgcatcccactttacatcagagttcagacttaataaagttatcataaatgtaattactattgaaagacctttcatgaaatataagtctccagagcacacaagagtatttcttctgaaaaaaatgttacaattatactagatggaagacttgcatcagttgcttaaactttcagaaaatttgtagagaaacccaacaaatctcataaatgtggaataacatttgttcaaaaatgatagcttagaaaacactagagttcatactaaaagatattttgcaaatacactaaat

SEQ ID NO: 1247 - DNA, 4338 bp, Homo sapiens
agtattctcggctcggccattattctgtgcctcggctgccggaagggctcgttcctgtgtcatctcctagcggcctggcgccgaggcggcggtacgcaaggctggagccgcagcgggagcccccgatgatactctccaagctgtaaggaagaagtcaaggattaaggagacctggactggagaggagcctttttcaaaaaacaacaatgacaagagaaaatgtagcccacaatgctctgagacaagagggccttgtgaaggggaaggatgatacctggaaatggggaaccagcttccaaggaagtagctcctctgtttgggagacctcccacctacactttagacaattacgttaccatgagacatctggaccccaggaagccctgagccggctcagggaactctgtcgccggtggctgagaccagaagcacgcaccaaggcacagatcctggagctgctggtgctggagcagtttctgagcatcctgcctggggagattcggacctgggtacagctccatcaccctggaagtggcgaggaggctgtggccctggtagaggagctgcagaaagaccttgatggaccagcaatacaagttccagtccttgtcaaggatcaggacactctccagaaggtggtgagtgccccaggaacaacacttcctcctgtacttcctggcagccacatagcagctgaaatttgcccgcatcctcctactgacctagtggcattcaacctccaggatcctcagcatgattctcctgcccctgaagcttctgccctttcccaggaagagaacccaagaaatcaattaatggcacttatgctcctaacagcccagccccaggagttggtgatgttcgaggaggtgtcagtatgcttcacttcagaggaatgggcatgtctgggcccaatccagagggccttgtactgggatgtgatgctggagaattatggaaatgtgacctccctagaatgggagaccatgaccgagaatgaggaggtgacatcaaagccaagtagttctcaaagagcagactctcataaaggaacatcaaaaagacttcaaggaagtgttccccaggtccttgattttgaagaagagtgtgaatggcaagttttggcaagtcagtggggaaatgaaacagatgaaagggcagatacagtgaagaaagtttccctttgtgaacgagacaagaagaaaaggactccaccagagaaacaaggccaaaagtggaaggaattaggagacagcttgactttcggttcagctatttctgaaagtttaataggtactgaaggaaagaagttttataaatgtgatatgtgttgtaaacattttaataaaatctcccatcttataaaccatcggagaatccacactggtgagaaacctcataaatgtaaggaatgtggaaaaggctttattcagcgttcgagccttctaatgcatttacggaaccattcaggggagaaaccttataaatgtaatgaatgtgggaaagcattttctcaaagtgcttaccttctaaaccatcagaggatccacactggggagaaaccttataagtgtaaggagtgtggaaagggcttctataggcactcaggcctaattatacatctaaggcgccattcaggggagagaccttataagtgtaatgaatgtgggaaagtcttctctcagaatgcttacctcattgaccatcagaggctccacaaaggggaagaaccttataaatgtaataagtgtcagaaagctttcattctgaagaagagcctcattctgcaccagagaatccactctggggaaaaaccctataaatgtgatgaatgtggaaagacctttgctcagaccacttatcttattgaccatcagcgactccacagtgcagagaacccttacaagtgtaaagaatgtggaaaagttttcattcgaagcaaaagcctcctcttacatcagagagtccacacagaaaagaaaacctttggttgtaaaaagtgtgggaagattttcagttctaagtcaaacttcattgaccataagaggatgcacagcagagagaaaccttacaaatgcactgaatgtgggaaagcctttactcaaagtgcttacctttttgaccaccagagactccacaatggggagaagccctatgaatgtaatgaatgtgggaaagtttttattctgaagaagagcctcattttacatcaaaggttccacactggagagaatctctatgaatgtaaagattgtggtaaggtcttcggttcaaacagaaacctcattgaccatgagagactccacaatggggagaagccatatgaatgtcgagagtgtgggaaaacctttattatgagcaaaagttttatggtccatcagaaactccatacacaagagaaagcctacaaatgtgaggattgtgggaaggctttcagttacaattcaagcctgcttgtacatcggagaatccacaccggagaaaaaccctttgaatgcagtgagtgtggaagagctttcagttcaaacagaaacctcattgagcataagagaatccacagtggtgagaaaccctatgagtgtgatgagtgtggcaaatgcttcattctgaagaaaagcctcattggacatcagagaattcacacgagggaaaaatcttataaatgcaatgactgtgggaaggtcttcagttaccgctcaaaccttatagcccatcagaggatccatactggtgagaagccctatgcgtgtagtgagtgtggaaaaggttttacgtacaacagaaacctgattgaacatcaaagaattcacagtggagaaaaaacctacgaatgtcatgtatgtaggaaagtccttacctctagtagaaatcttatggtacatcaaagaatccatactggagagaaaccttataaatgtaatgagtgtggaaaagactttagtcagaataaaaaccttgttgtacatcagagaatgcacactggggaaaaaccttatgagtgtgacaagtgtaggaaatcctttacttctaagaggaatttagttggccaccagagaattcacacaggggagaaaccctatgggtgtaatgattgtagtaaagtttttaggcaaagaaaaaaccttactgtacatcagaaaatccacacagatgaaaaaccttgtgaatgtgatgtgtctgaaaaagaattctctcagacttccaaccttcatcttcaacagaaaatccataccattgaggaattctcttggctacaaaacaccaatgagtccaagattgagattcagaaaatctagtgtcatatgtaaaatggaatagaatccctgcctacttaagtaactgttggacaaatgatatatatttcttctaaggaaaaagtttattatttactctttactagacaaatgagtagcatatagaagaaagttaataggccgggcttggtggctcatgcctgtaatcccagcactttgagaggccgaagcgagtggatcacctgaggtcaggattttgagaccagcctgaccaacatggtgaaaccccatctctactaaaatacaaaaattatccgggcatgggggcacacaccggtaatcccagctactcaggaggctgagacaggagagtcgcttgaacctgggagggcggaggttgcagtgagccaggatcgcgccattgcactccagcctgggcaacaagagcgaaactcttgtctgaaaaaataaagttcatcccaactttcaagtctacaaaaacataatccaaatctaataacatagttgtaaatgagagcaacaataaaaagtagacatgggctgggtgcagtggctcactcctgtagtcccaggactttgggaggccgaggtgggaagatcccttgagcccaggagttcgagacaagcctgggtaacacggggagacccgtctttagtaaataaaaataaatttattaataaaactaaaaatttaataataaaaagtggacattgttttttaaaatgtgtatagtatgcattttaaagatagtgtcactgctgtggaaaacctgaacagacagtatgatccagaatgtcaggtgtggagttgggcggacaagagtctgctgatgaggacaacctaaaagagcactggatttggaatcagaagacctacctttgattcctggctttcccttaatggccatgtgatgttattaagtcagcctctaaagctttagtttcctgtcagtcaaatgttgacatgatacctacctcacagggttgttgtgagggttaagtgaaaggatctttgtgaaagtactttttgaaatcattcagttgtcaataaagttggataaaa

SEQ ID NO: 1248 - DNA, 334 bp, Homo sapiens
aatcgaaaaaataccgacctctaggttcttgtgagatctgttctaaaagcttggttagtagtgaggaatgtggacggtaaatcctgctgcctcgaaagctcggcagtcggactgcatgtaaatgcgcatgggggccatcccagtagctgcctcatctcagctatccctcacgtttcagggccggcggcggcccgcggaagccagatcccggagggtcccgcccccgacgccaatttagacggtgagggattcccgctccaggattcttatgctgacttaacggaccccctccggtcctcaaatacccgcccaaaaaaccctccccccaaattcc

SEQ ID NO: 1249 - DNA, 2188 bp, Homo sapiens
gctctgccacaacttctgtcgctctgccgcctgcaccgtgacccgcactattcacgggagccctagagaggacaccgggacacccagaagccgggaaatgatgtttcaggattcagtggcctttgaggatgtggctgtcagcttcacccaggaggagtgggctttgctggatccttcccagaagaatctctacagggatgtgatgcaggaaaccttcaagaacctgacctctgtaggaaaaacatggaaagttcagaacattgaagatgagtacaaaaatcccaggagaaatctaagtcttatgagagagaaactctgtgaaagtaaagaaagtcatcactgtggagaaagcttcaaccagattgcagatgacatgctgaacaggaaaactcttcctggaataacaccatgtgaaagcagtgtgtgtggagaagttggcacgggtcattcatctcttaatacgcatatcagagctgacactggacacaagtcatctgagtatcaggaatatggagagaatccatatagaaataaggaatgtaagaaagccttcagttatcttgactcctttcaatcacatgataaagcttgcactaaagagaaaccctatgatggtaaagaatgtacagaaaccttcatttcccattcatgcattcaaagacacagggtaatgcacagtggagatggaccttataaatgtaagttttgtgggaaagccttctattttctcaatttatgtcttatccatgaacgaattcacactggtgtgaaaccatataagtgtaaacaatgtggtaaggcctttactcgttccactacccttccagtacatgaaagaactcacacaggagtgaatgccgatgaatgtaaagaatgtgggaatgcattcagttttcctagtgaaattcgtagacataaaaggtctcacactggagaaaaaccctatgagtgtaagcaatgtgggaaagtcttcatttctttcagttccattcagtatcataagatgactcacactggagagaaaccctatgaatgtaagcagtgtgggaaagcctttagatgtggctcacaccttcaaaagcatggaaggactcacactggagagaaaccctatgaatgtaggcaatgtggtaaagccttcagatgtacctcggaccttcaaaggcatgaaaagacacacactgaggataaaccctatggatgtaagcagtgtgggaaaggctttagatgtgcttcacaacttcaaattcatgaaaggacgcacagtggagagaaaccccatgaatgtaaggaatgtggaaaagtattcaagtatttttcttccttgcgtatacatgaaaggacgcacactggagagaagccccatgaatgtaagcaatgtggaaaagcattcaggtatttctcttccttgcatatacatgaaaggacacacactggagataagccatatgagtgtaaggtatgtggcaaagccttcacttgttccagttccattcgatatcatgaaaggactcacactggagagaaaccctatgaatgtaagcactgtggtaaggcctttatttccaattacattcgatatcatgaaaggactcacactggagagaaaccctatcaatgcaagcaatgtggcaaagcctttattcgtgccagttcatgtcgagaacatgaaagaactcataccattaatagatgagaaatccttttagtggaagcaacgggagaagctttctgttgtcccacttcctttgaaacacaagaaaagagagtggtgaaagaacctctggataactgctttttgaattgagaagagagacttgcgataggacaataaaatctagaagaacttggatggtttcgtaatacaattcacctatagccaatcttgcatgagatttcaaaggcacagaaaaggaaggcatcagtcacatattagaggccccacacagggagagaggtgtgtggctacccgcttccagcccattttcctgattctttggcttgttaatcgagaatatcccccaaatcacttgtctctgttcctcagagttgtaggtctccagatatgtccccagtgctccacattaaagataacatgcccactttgctgtttcttcagaaatgttaaaatgtttaccagagaactaataaatgttgttatggctggaaataaaaaaaaaaaaaaaaa

SEQ ID NO: 1250 - DNA, 3387 bp, Homo sapiens
acttcccagaaggcaccgagtccctgccgttctcctcaactggcggcggcgcgaacgaatagtcgccggcgacctgtgagggcactcggaagggcgaggggagggctcgaccgctcgcgcctagtttttctatctctcccggagcctgagtctctgagccgtccccagcaaacgctcaggggctgcagaggccccgagaggtgaggggctccgtgagggcgggaaccaggctgaggccgcctctggggagcggagcgtgtccgttgctgagggagcaaggccgggtagggagcctggtgagcgcctcaggcaggggcgcacgctgagctttacggtaaaggtgttccttgaccagcggaagaggccccagagtgagcctggcccggcggtccttagtgggatgtcgcctgccgctctcagcagagctttgacggcggagaggagtcggcaggcggtgtgtggacacctcctcggccttgcatctgctccccgggagagtcaccaaccgcctccccgcccaaagggcaccggagggagcttcggttcgagggcttggctctctggcagatttcctctagtaagaggtggctctggaggccccgcgaaacgagtgtggtgtgtggttgcaaggcatgatggctgcaaaagtggttcctatgcccccaaagccaaagcagtcctttatactgagagttccgccagactccaagctgggccaagacctacttcgagatgccactaacgggcccaagaccatccaccagctagtgctggagcacttcctcaccttcttgcccaagccaagcctggtccagcccagtcagaaagtcaaggagaccttggttattatgaaagatgtgagctcaagccttcagaacagagtgcatcctcgtcccttggtgaagcttctgcccaaaggagtccaaaaggaacaagagacagtgtctctgtatttgaaagctaaccctgaggagctggtggtctttgaggatttgaatgtatttcactgccaggaagaatgtgtgagcttggatcctactcaacaactcacgtcagagaaggaagatgacagcagtgtcggggaaatgatgttactggcagtcaatggcagtaatcctgaaggtgaagatcctgagagggaacctgtagaaaatgaagattatagagaaaagtcttcagatgatgatgaaatggattcttccttggtctctcagcagcctcccgataaccaggaaaaggaacgactaaatacatccattccacaaaaaaggaaaatgagaaatctgttagttaccattgagaatgatactcctctagaggaactctcaaaatatgtagacatcagtattattgcccttactcgaaatcggaggacaaggagatggtacacttgtccactgtgtgggaaacagtttaatgaaagttcttacctcatttcccaccagaggacccacactggagaaaaaccctatgactgtaatcactgtgggaaaagcttcaatcataaaacaaacctcaataaacatgagcgaattcatacaggagagaaaccttattcctgttctcagtgtggaaaaaacttccgtcagaattctcatcggagtcgtcatgaaggaatccatataagggagaagatatttaagtgtccagaatgtgggaaaaccttcccaaagaatgaggagtttgtgcttcatctgcagagtcatgaggctgagagaccatatggttgcaaaaaatgtgggagaagatttggtcggctgtcaaactgtacccggcatgagaaaacccactcagcctgtaagacccgaaagcagaagtaatactgggaaccctttctgggtctgatggtgctgcctcaacctgagagctttcataagtagttctgaattcccaagctgcctaaaaaggtataaatgtgtaaaaatctcattattgccaaaattggataaatgcccatcttagctaaaacctcaaattgctagaaaattcacagggaagaaaacatttcaagggctatacctcagcatctaggctttttggactaaggagctttcctttttgaagttatatgataatgtacaggtcacagatcccctttcccaacactttgaagatgaatctggagtctgcttacttggaaggcaaagagtgacttgtgtctattgaaagtatatccgttttccccccacatggggattcatacttgagaaatagtgcaaagatgcttatctggaactgtgttctggtgaaagaaccaaattactggcttgttagccaacagcttctgatagcaattcatataaccctctaagaatacctgtttaagtcttgagtgttgaaaggaattgtttactttggaatataggaaaacagttgaatgtcagactctcatttgtatgtgatctaaatttgcaatcaatttcaataatatttacaatttgtgataaaactgacttttacagattccttttcacaacataatttaggtgtctactgttcttattgtattttgttctgctgttgatctctccagcagccgtctcatgcttctcccttgctaaaagaagtttggattactcaggcagggccatccagccccaccactagaaaagctcttcagaatcttgtccctctgttgagcccagatctcatgtgctacgaaggaaaccccaagacccagagaggaagggtcaacctggaggcaggaaaaagttggcttggatccatgtctcatcaataaccttaccatatgcttaggtcccctctatgctgtcatcagacctttggcaatggggtggtcactacctcacaaggcaaagtgttgtatgattagaaattacgtctccagtggttagctcacattgcctctcaagagacaggtttccaggtgtcttcattgtagtgggtattaattgtcttcagcctcttgatatccataccttcctgtcctctgcctagaagcaaggccagcggtgcctttacggactgatcgtgtggtgcgatttagggattcttcagttttgcttgctttaggtttccaaaagttatacattggtgttttgattggaataaagaaatcctataagctatttgggaaaaattatagtgtatgtttcccatccagaaacatgcctttctatttattagagtattatattcctgtgaaaatttttctaattttcttcacttgttttacacaattttgttattgtagttttttccattatatttttatagttgattattgcttttacatgggaaagttatttttaattatatatttgtatagtcatctcactgttgttaattttcaatagtttgttggtttagttctgttaacttttggtaaaatgacaccatctacaaagaatagtttttgtttcttgc

SEQ ID NO: 1251 - DNA, 4055 bp, Homo sapiens
ccgacccgctaggccccgcgcggctcggatccggcggcgctgtttcggtcgggagtgggtgggagagaagccggggcaggggaggagccgccggagctgtcggagccgtgacacccagggcagctacactcagaagccacaaggaatgctagtggagcccctcatccctcccagcttctcttccaagctgccccgtggggcttgatccaggaagctacttcagaaagtagacaatcattccaagggtacaacaaggtttaccacaatgtgagggactcagccattgcaaattgtacagatgagggcccttggaagaaaatcctcgctgtgtccaggctgaggcggggggctaatgacagtgtgagctctagatggtgtgagaccaccccaaagccaagaaatggctacagccgtggaaccagaggaccaggatctttgggaagaagagggaattctgatggtgaaactggaagatgatttcacctgtcggccagagtctgtcttacagagggatgacccggtgctggaaacctcccaccagaacttccgacgcttccgctaccaggaggcagcaagccctagagaagctctcatcagactccgagaactttgtcaccagtggctgagaccagagaggcggacaaaggagcagatcctagagctgcttgtgctggaacaatttcttaccgtcctacctggagaactacagagctgggtgcggggccaacggccagaaagtggcgaggaggcagtgacgctggtggagggtttgcagaaacaacccaggagaccaaggcggtgggtgactgtccatgttcacggccaggaagtcctgtcagaggagacggtgcatttaggagtggagcctgagtcacctaatgagctgcaggatcctgtgcaaagctcgacccccgagcagtctcctgaggaaaccacacagagcccagatctgggggcaccggcagagcagcgtccacaccaggaagaggagctccagaccctgcaggagagcgaggtcccagtgcccgaggacccagaccttcctgcagagaggagctctggagactcagagatggttgctcttcttactgctctgtcacagggactggtaacgttcaaggatgtggccgtatgcttttcccaggaccagtggagtgatctggacccaacacagaaagagttctatggagaatatgtcttggaagaagactgtggaattgttgtctctctgtcatttccaatccccagacctgatgagatctcccaggttagagaggaagagccttgggtcccagatatccaagagcctcaggagactcaagagccagaaatcctgagttttacctacacaggagataggagtaaagatgaggaagagtgtctggagcaggaagatctgagtttggaggatatacacaggcctgttttgggagaaccagaaattcaccagactccagattgggaaatagtctttgaggacaatccaggtagacttaatgaaagaagatttggtactaatatttctcaagtgaatagttttgtgaaccttcgggaaactacacccgtccaccccctgttagggaggcatcatgactgttctgtgtgtggaaagagcttcacttgtaactcccaccttgttagacacctgaggactcacacaggagagaaaccctataaatgtatggaatgtggaaaaagttacacacgaagctcacatcttgccaggcaccaaaaggttcacaagatgaacgcgccttacaaatatcccctaaaccggaagaatttggaagagacctcccctgtgacacaggctgagagaactccatcagtggagaaaccctatagatgtgatgattgcggaaagcacttccgctggacttcagaccttgtcagacatcagaggacacatactggagaaaaacccttcttttgtactatttgtggcaaaagcttcagccagaaatctgtgttaacaacacaccaaagaatccacctgggaggcaaaccctacttgtgtggagagtgtggtgaggacttcagtgaacacaggcggtacctggcgcaccggaagacgcacgctgctgaggaactctacctctgcagcgagtgcgggcgctgcttcacccacagcgcagcgttcgccaagcacttgagaggacacgcctcagtgaggccctgccgatgcaacgaatgtgggaagagcttcagtcgcagggaccacctcgtcaggcatcagagaacacacactggggagaaaccattcacgtgccctacctgtggaaaaagcttcagcagaggatatcacttaattaggcatcagaggacccactcagaaaagacctcctagctaggtccccatgtgaggagatctgctttcagccctcacctaagggaggtgaggaagaggaaaagccctcttgtcagcctgggaagaccttttcgagggagtctccctgacctgctcagatctgacattacctcttcctgcaactaaacacgagcctgggcagaacctctcagccttcctctacgccttgaggggatgtttcatccaaagtacaacctgaattgaggcttctccttcactggagtgcacctgcctctacctcatgggtataaagtaggagaactaagagacttaagaggtcgtggttcctatatcgtccaaaaaataggctgttacatatcctaaagactgctcaacagcttcaagttgaaagtggccaaggacagccccttaggtttgggaagggacgagcctgaaggattctgtctttactggggtcaaatcttaaagcacacagctctggactcaagacaggaggtttgcgtcctgatggctttgccacacattcacaggataactgcatagatccctcgctgtctgattcacttcttaccatgcactttcctttgatgctgaggagaaatggaagtgggcgaaaaatctcaaggctgcttcatgtggaccttgtcaagctgctccctcccccagcgtcaaattgttatcaggtgccaaacactgctagaaaggagggcctagtcagaagcctctttccatacgagttttggttttgtttttaatatttttttctattaaaatactcatgcatttaaccttcccgttattcaaccagtctcttggttgcatccctagcacttctactacaagtgagatggtagtgtttgagtgcttattgagtaaagcataattcggtcataatgaaatcgttcacattccctcatatgcacaagcccaccaaccccttcacaccccccttcacaggggtcgtatgagtaaggggatttggaaactgtcaacttacaaaggcactataacaattacagaatcatgattgccatgggccactttatttacatgaagacaactggagaacgactaagaccaaattatggaaaataagaaaaagctgttgctggcaagaccatcaagactgttctgacaccctgtccccatcatccctgactgagtactctgacatcacggaaagtgttgaacctgggaccctgaggaattcaccaggagtaaatggctttcatgtatttgtgttgtttgctttttcttacgtgattttatgttcatagagctagaaagtagcatctcatgatggcccaacaatctctgttgccagttaaaggttccttggagatgaggctgaataattatgaacctcaccttctctgattgtgggagtggcaagaactggggagacgtcctccataagtggagcacagggtatggggttaaagcatgacagggagagtcttctgtgcctggtttcttctcctctatctcataatgcattatgggcccgaggaataggggagggttaataagactccaaccctaatggcccaacagggaaattctcattttggtcgatgatattctgatggactggtttggtcttaataccagtcaaccgttgtccttctggaaatatacatatatgaaataaataaaggtaacacttgcagccaagttccctggtttctgggacttcccatcttacccattccttttccagggcttc

SEQ ID NO: 1252 - DNA, 2077 bp, Homo sapiens
ctgtcttccctactcccagtctccacccaactcccccgcccgccccgtgcaggctgtggagactcccttcccgggggagggggcccccactgccgcaggtgccccctctgcctccaccccggctcctggccagaagctggagggggcttggccaaaaagagggagaaacaactcagctgttctttctagctctgaaatagaaaatgtctgcagacggcggaggcatccaggacacccaggacaaggagacacccccggaggttccagatcgtggacatcctcatcaggaaatgccttctaagctgggggaggcggtaccttcaggggacactcaggagtcactgcacattaagatggagcccgaagagccacactccgagggggcatcgcaggaggatggggctcaaggtgcctggggctgggcacccctaagtcacggctctaaggagaaagctctcttcctgcctggcggagccctcccctccccccggatccccgtgctttcccgagaggggaggaccagagaccggcagatggctgcagcgctcctcactgcctggtcccagatgccagtgactttcgaggatgtggccttgtacctctcccgggaggagtggggacggctggaccacacgcagcagaacttctacagggatgtcctgcagaagaaaaatgggctgtcactgggctttcccttcagcaggcctttctgggcccctcaagcgcacggcaagggtgaggcctcgggctccagccggcaggcaggagatgagaaggagtggagaggcgcgtgcacaggagccgtcgaggtggggcagagggtgcagacctcatccgtggcagcccttgggaatgtgaagcccttcagaaccagggcagggagagtccagtggggcgtcccgcagtgcgcgcaggaagcagcctgcggccggagctcagggccggccaaagactccgggcagccggctgagccagatcgcaccccggatgcagctccgccagaccccagtcccacggagccccaggagtaccgcgtcccggagaagcccaacgaggaggagaagggcgccccggagagtggcgaggagggcctggcccctgacagtgaggtgggcaggaagagctaccggtgcgagcagtgcggcaagggcttcagctggcactcgcacctggtgacgcaccggcgcacgcacacgggcgagaagccctacgcctgcactgactgcgggaagcgcttcggccgcagctcgcacctcatccagcaccagatcatccacacgggcgagaagccctacacctgccccgcctgccggaagagcttcagccaccactccacgctgattcagcaccagcgcatccacaccggagagaagccctacgtgtgcgaccgctgcgccaagcgcttcacccgccgctcggacttggtcacccaccagggcacccacacgggcgccaagccgcacaagtgccccatctgcgccaagtgcttcacgcagagctcggcgctagtcacccaccagcgcacccacactggggtcaagccctatccgtgccccgagtgcggcaagtgcttcagccagcgttccaacctcatcgcgcacaaccgcacacacacaggcgagaagccctaccactgcctcgactgcggcaagagcttcagccacagctcgcacctcaccgcgcaccagcgcacccaccgtggcgtgcggccctacgcctgcccgttgtgcggcaagagcttcagccggcgctccaacctgcaccggcacgagaagatccacaccaccgggcccaaggccctggccatgctgatgctgggggcggcggcggcgggggctctggccacacccccacccgctcccacctaggaggccaggaaagggggagcggggcgcccagggccactggaacagccccactggagtcaaggctccgagggaggagagaggggctcgggaagggagctggggcggtgagggcatggggtgaggcatggcgatgggggagggcgagggcgagaaagggcaggcactctgcgaattaaaggccttggacttgaaaaaaaaaaaaaaaaaaa

SEQ ID NO: 1253 - DNA, 2285 bp, Homo sapiens
cggagcggggaacgaggccgtcggccattttgtgtctgcttcctgtgggacgtggtggtagccgttgggttgggaaagtgagggatttttggcctcgtttctcctgcttcttttctcctcccttttactttgccggtagaacacagttatgggtcgcaagaagaagaagcagctgaagccgtggtgctggtattgtaatagagattttgatgatgagaagatccttattcagcaccaaaaagcaaagcattttaaatgccatatatgtcacaagaaattgtatacaggacctggcttagctattcattgcatgcaggtacataaagaaacaatagatgccgtaccaaatgcaatacctggaagaacagacatagagttggaaatatatggtatggaaggtattccagaaaaagacatggatgaaagacgacgacttcttgaacagaaaacacaagaaagtcaaaaaaagaagcaacaagatgattctgatgaatatgatgatgacgactctgcagcctcaacttcatttcagccacagcctgttcaacctcagcaaggttatattcctccaatggcacagccaggactgccaccagtaccaggagcaccaggaatgcctccaggcatacctccattaatgccaggtgttcctcctctgatgccaggaatgccaccagttatgccaggcatgccacctggaatgatgccaatgggtggaatgatgccacctggaccaggaataccacctctgatgcctggaatgccaccaggtatgcccccacctgttccacgtcctggaattcctccaatgactcaagcacaggctgtttcagcgccaggtattcttaatagaccacctgcaccaacagcaactgtacctgccccacagcctccagttactaagcctcttttccccagtgctggacagatggggacacctgtcacaagctcaagtacagcttcatccaattcagaaagtctgtctgcatcttctaaagctctgtttcctagcacagcacaagctcaggcagctgtccaaggacctgttggtacagatttcaaacccttaaatagtacccctgcaacaactacagaacccccaaagcctacattccctgcttatacacagtctacagcttcaacaactagtacaacaaatagtactgcagctaaaccagcggcttcaataacaagtaagcctgctacacttacaacaactagtgcaaccagtaagttgatccatccagatgaggatatatccctggaagagagaagggcacagttacctaagtatcaacgtaatcttcctcggccaggacaggcccccatcggtaatccaccagttggaccaattggaggtatgatgccaccacagccaggcatcccacagcaacaaggaatgagacccccaatgccacctcatggtcagtatggtggtcatcatcaaggcatgccaggataccttcctggtgctatgcccccgtatgggcagggaccgccaatggtgcccccttaccagggtgggcctcctcgacctccgatgggaatgagacctcctgtaatgtcgcaaggtggccgttactgatcttacttcatccagtctaataggtttggagattaaaccttttctcaacttgtgctgtttatatagccaagcttccgtcaataaggcttcattgtgactttaacaaacattatcttcccacataccaggaactattggacatttattttacatgggaaaaattatttggaataataaagcaggaacttttcctgaagttgcaatttatactgtatggcttctttttcatgtttcatctaggtttttagaagtgaagtatagtaaatttggttcgttaaattgtgaaggcgctggaattacatgaacataccaccctagtaaaggcaagttctgtaagcttacattgctatttgtaaagtttgccttcacagcatttcagatgctgttggacttcatgtccccaacctagcttggtgagggctgtaactgtttccaagtacttgtacattggaagtctgaatgtgtaacaatatttaatgtatttagagttcctcatgttgcagggtttaagaaatctgacccaccaaggtcatgtgacttttctgtactgttaaacttcattgtaataaaatgagagaaaaatttatgcctttttattcataacccagctgtggaccactgcctgaaaggtttgtacagatgcatgccacagtagatgtccacataataaaattcatagttaccaatgcaaaaaaaaaaa

SEQ ID NO: 1254 - DNA, 9088 bp, Homo sapiens
cctttgtctctcgctgcagccggaggtcaaggtctcgtccttactgctgtgtgtcctctgctcctagagtcccagcctctgtggccctatgacctgcaggtattgggagatccacaactaagtcgccaggaccccctggaagcctagaaatgggatcattgacatttagggatgtggccatagaattctctctggaggagtggcaatgcctggacactgcacagcagaatttatatagaaatgtgatgttagagaactacagaaacctggtcttcctgggtattgctgcctttaagccagacctgatcatttttctggaggaaggaaaagagtcctggaatatgaagagacatgagatggtggaagaatccccagttatatgttctcattttgctcaagatctttggccagagcagggcatagaagattctttccaaaaagtgatattgagaaggtatgaaaaatgtggacatgagaatttacacttaaaaattggttataccaatgtggatgagtgtaaggtgcacaaagaaggttataataaacttaaccagagtttgacaactacacagagcaaagtatttcaacgtggcaaatatgcaaatgtctttcataaatgttcaaattcaaacagacataagataaggcatactggaaagaaacatttgcaatgtaaagaatacgtcagatcattttgcatgctttcacacctatctcaacataaaagaatttatactagagagaattcctacaaatgtgaagaaggtggcaaagcttttaactggtcctcaacccttacttattataagagtgctcatactggagagaaaccctacagatgtaaagaatgtggcaaagcctttagtaagttctcaatccttactaaacataaggtaattcatactggagagaaatcctacaaatgtgaagaatgtggcaaggcttttaaccaatctgcaatccttactaaacataagataattcatactggagagaaacccaacaaatgtgaagaatgtggcaaagcctttagtaaggtctcgactcttactacacataaggcaattcatgctggagagaagccctacaaatgtaaagaatgtggcaaagccttcagtaaggtctcaacccttattacacataaggcaattcatgctggagagaagccctacaaatgtaaagaatgtggcaaagcctttagtaagttctcaatccttactaaacataaggtaattcatactggagagaaaccctacaaatgtgaagaatgcggcaaagcctataagtggccctcaacccttagttatcataagaaaattcatactggagagaaaccctacaaatgtgaagaatgtggcaaaggttttagtatgttctcaatccttactaaacatgaggtcattcatactggagagaaaccctacaaatgtgaagaatgtggcaaagctttcaactggtcctcaaaccttatggaacataagaaaattcacactggagagacaccctacaaatgtgaagaatgtggcaaaggctttagtatgttctcaatccttactaaacataaggtaattcataatggagagaaaccctacaaatgtgaagaatgtgataaggcaactcatgctggagagaaaccctacaaatgtgaagaatgtggcaaagctttcaactggtcctcaaaccttatggaacataagagaattcatactggagagaaaccctacaaatgtgaagaatgtggcaaaagcttcagtacattctcaatccttactaaacataaggtaattcatactggagagaaaccctacaaatgtgaagaatgtggcaaagcctataagtggtcctcaacccttagttatcataagaaaattcatactgtagagaaaccctacaaatgtgaagaatgtggcaaagcttttaaccaatctgcaattcttattaaacataagagaattcatactggtgagaaaccctacaaatgtgaagaatgtggcaaaacctttagtaaggtctcaacccttactacacataaggcaattcatgctggagagaagccctacaaatgtaaagaatgtggcaaaacctttattaaggtctcaacccttactacacataaggcaattcatgctggagagaagccctacaaatgtaaagaatgtggcaaagcctttagtaagttctcaatccttactaaacataaggtaattcatactggagagaaaccctacaaatgtgaagaatgtggcaaagctttcaactggtcctcaaaccttatggaacataagagaattcatactggagagaaaccctacaaatgtgaagaatgtggcaaaagctttagtacattctcagtccttactaaacataaggtaattcatactggagagaaaccctacaaatgtgaagaatgtggcaaagcctataagtggtcctcaacccttagttatcataagaaaattcatactgtagagaaaccctacaaatgtgaagaatgtggcaaagcttttaaccgatctgcaatccttattaaacataagagaattcatactgatgagaaaccctacaaatgtgaagaatgtggcaaaacctttagtaaggtctcaacccttactacacataaggcaattcatgctggagaaaagccctacaaatgtaaagaatgtggcaaagcctttagtaagttctcaatccttactaaacataaggtaattcatactggagagaaaccctacaaatgtgaagaatgtggcaaagcctataaatggccctcaacccttagttatcataagaaaattcatactggagagaaaccctacaaatgtgaagaatgtggcaaaggttttagtatgttctccatccttactaaacatgaggtaattcatactggagagaaaccctacaaatgtgaagaatgtggcaaagccttcagctggttgtcagtctttagtaaacataagaaaactcatgctggagagaaattctacaaatgtgaagcatgtggcaaagcctataagtcatcctcaacccttagttatcataagaaaattcatactgaagagaaaccttacaaatatgaagaatgtggcaaaggctttagtacattctcaatccttactaaacataaggtaattcatactggagagaaaccctacaaatgtgaagaatgtggcaaagctttcaactggtcatcaaaccttatggaacataagaaaattcacactggagagacaccctacaaatgtgaagaatgtgacaaagccttcagctggccctcaagccttactgaacataaggcaactcatgctggagaaaaaccctacaaatgtgaagaatgtggcaaagccttcagctggccctcaagacttactgaacataaggcaactcatgctggagaggaaccctacaaatgtgaagaatgtggcaaagctttcaactggtcctcaaaccttatggaacataagagaattcatactggagagaaaccctacaaatgtgaagaatgtggcaaaagctttagtacgttctcaatccttactaaacataaggtaattcatactggagagaaaccctacaaatgtgaagaatgtggcaaagcctataagtggtcctcaacccttagttatcataagaaaattcatactgtagagaaaccctacaaatgtgaagaatgtggcaaaggctttgttatgttctcaatccttgcaaaacataaggtaattcatactggagagaaactctacaaatgtgaagaatgtggcaaagcctataagtggccctcaacccttagatatcacaagaaaattcatactggagagaaaccctacaaatgtgaagaatgtggcaaagcctttagtacgttctcaatcctcactaaacataaggtaattcatactggagagaaaccctacaaatgtgaagaatgtggcaaagccttcagctggttatcagtcttcagtaaacataagaaaattcatactggagagaaactctagaaatgtgaagaatgtggcaaagcctataagtggccctcaacccttagttatcataagaaaattcatactggagagaaaccctacaaatgtgaagaatgtggtgaggctttcaactggtcctcaaaccttatggaacataagagaattcatactggagagacaccctacaaatgtgaagaatgtggtaaaggctttagtatgttctcaatccttactaaacataaggtaattcatactggagagaaaccatacaaatgcaaagaatgtggcaaagcctataagtggtcctcaaccctcagttatcatagaaaattcatactggagagaaaccctacaaatgtgaagaaagtggcaaagccttcagctggttctcagtctttagtaaacataagaaaattcatgctggagagaaattctaaaaatgtgaagaatttggcaaagcttttaaacagttcccaaccctcctacacataagaaaattcatgctggagagaaactctacaaatgagaagaatgtggcaaaggcttcaaccagtcctcaaaccttatggaacataagagaattcatactggtgagaagccctacaaatgtgaagaatgtgataaagacttcaactggtcctcacaccttactactcataaaagaattcatactggaggaaaaaccctacaaatatgaaaaatgtggcaaaactattaattaattctcaacgcttactgaacataagggaatttgtacaggagggaaaccctacaaatctgaagaatgtggcaagccttttagctattcctcaatccttactaaacattcatgtaattcatactggagggaattcctacaattgtgtggaatgttgcaatgcccttaaccagtccttaaggcttactacatataagacaactcatactggagagaaaccatgcatgtgtgaagaatgtgggaaagcctctaatagatcctcaattcttaagagacataagctaattcatacacaagagagactctacaaacctgaaagatgtgacaatgcttttggcaacacctcagacttttctgaatataaaagaaatcgtacagatgagaaatcctagaaaagtgaagaatatgacaaagcctttaagtggctgtcacacttgattgtaggtaagataactcatactggagaaaactactgtaataaacaatgtgacaaacatttaaccagtgctcatgccttattgcaaaggaaagcatttacactagcctgggcaacagagagagactgtctggaaaaaaaaatttttgttaatgccagtaatatcttctcacagcttattaaacatcagagagttcatactaaataaaagtattaaaagtgcaatcactgtcactagatctttcagaaaataaaagctgttaaagtacagaagaatatttattttgaggaaacacattataaatattaagagggttgtagtacatgtacttgtatcacagattttattgtacacattttgtactacaggaaaacctgaggtagttgttccaactttgctcaacatcagggaatttatattgaagaataaccctgcaaatttaataaatttggaaaaacattttttcaaaaactacagattataaaacacaaatgcgtttatactaaaatatgtttttgcagatacagtaaatataaaaaatatttaatccaaaattaagtttatgtaaatatcagctaattcacagtagaaatacctgtcactcaaacttcagatattacactaaatcagactgctgagtataggaaaaaatccaaaactaaagttggcaaaaagaagaattatttgtatataactttaaaagaagtagatctttgaagagttataattaaatttaaagtatacttttttcttcaaaacacagattttttttttttccagacacattggcttactgtggccaatactttgtgatgccaaggtgggcagatcacctgaggtcaggagttcaagaccagccttgccaacatagtggaactaaaaagaaatgtttactaaacatgtttactaaaaagaaataaagaaattagccaaggtctagcttccaggttcatgccattctcccacctcagcctcccaattagctgggactacaggcgcccgccgccactcccagctaattttttgtatttttagtacagatggggtttcaccatattagccaggacggtctctatctcctgacctcatgatatgcccaccttggccacccaaagtcctgggattgcaggcatgagccacagtgcctggcctaataacagaagtctttagcagagcaaaaatgtataaaatgtataatgacattgtataagtaataataaacctactaaccataaaaagccctggatcatatgaaatcacagcgaagttttaccacattgcaaagagttttacctaagcctactgaatgcattcgaaaaaatcaaggtgggatttcaccctaacttgttatattaaatcagtgaaatatatgaaactaaaatctagtgaaggcaccacaaaaaaaggaaagtacaggtcaatattctgggtgaatattggaataataatcctccatgaaatactagcaaactgaattcaaaagcaaatcagaaagttattttgctacattaatgtgagcttttccatatatatgaaggtgtttcatgatatggaagtcaataagtgtgattcaccatgtaaagataattaaaagaaaaaaaaataacagtaggggcagaaaaagcattcaagaaaacccaatattaactcaaaaatgttgtcaacacactggacattgatgaaaatatcttaataagagtcatctatgacaaatccttagccaacatcatactaaaagagcaaaaactggaagcattctccatgagaataaaaataagaatatccattctaaacagtcctattgaagttatgaaatcctagccagagaataaaaggaatccaaacagaaaacaaagaaagtcaaattatctttactgatgaaagaattgtccacctagaatactttaaaggtttcaccaaaagagttctaagcctggaaaaagacttcaaaaaaaatcttagaatacaaaatcagcacaaatgcatagcatttctgtacaccaataatattcaaactgagaacaaaataaaaaacacagctctatttacaatagcaacaaacacacaaaaaaatacctagaaatacattaaatcaagggggtaaaatatctctacaaagaacaacaaaacattgctgaaagaaacgagagacaatgcaaataaatggaaaaatattgctcatggattcaaataatataattaaaatggtcattctgcctaaagcaacctacagattaagtgctatttttatcagactatccatgacgatttttattgaattagaaaaagaaaactattctaaaatacattcaaaagaattaaagagctcaaatagccaagaaaacttcagactaaaagaataaatctgggccaagcatggtggctcatgcctgtcatctcagccctttgggaggctgagatggatggatcacctgaggtcagaagtttgagaccagcctggccaacatggtgaaacctgcatctctactaaatgtaaaaaattagccaggtgtggtggtgcatgcctgtaatcccagctacttgggaggctgaggaaagagaaccatttgagcctgggaggtggaggttgcagtgagccaagattgcatcagaataaccagtataacatggttctggtacaaaaataaacatctagaccaatgaaatggaagagagagtactgaattaagctatactttgcaatcaggttatttttacaaagccaacagaaataaacaaaaggggaattaactccctatttagtaagtaatactgggaaaactggttagtcatatgtggaagaaaactgtactacctttttctataaaaaaaaaacaactcaatatagattaaagacttgatctgtgagtctccaagctacaaaaatcttagaataacacttagataatactggcctctgtaaagaatttatgactaacatctaacatgagtgcaacaaaaataaaaataaaaaatggcatctaagccaaagagcttctgcacagtaaaagaaactatcagcaaagtaaacagatgacctacagtatgaaataaaatatttgcaaactgcagacaatgaaggattaatgtacagaatctataatacatttaataaaaaagcaaacatgatatgaatagccagcttcttctcaaaggaagacataagagctgccaataaacatgtaaaaattgctcaacgttcctaattatcagaaagatgtaaatcaaagtgacagtgtgatactatttcataccagtaagaatgacttattaaaagtaagataaataagatgttgaagttgtagagataaggaaatctttctacactgttggtgggaatgcaaattaattcagaacctgtgcaaagcagtttggggacttctcaaagaactagaaatagaattgccatttgaccaatcaagccgattactggatatctgcccccaaaaagaataaataattttgccaaagagacaccagcactcacatgttcattgcagcactattcacaatagcaaaaacagaatttaaccagttacccatgaatcttttattggataagaaaaatgatgtacttatacaacctccaatactatgcagcaacagaagagaatgaagtaacgtcttttgcagcaacatgaatgcagctctgcttcaggccattctaagcaaattattgcatcagaaaaacaaatgccacatgttctcactcatacatggatgctaaaaattgggcgcacatggaaacaaagatgaaaacaataaacactgagaattctaaaaagaaggaggaaggatgggagacaagcatagaaaatctgcttaggtatgatgtacactacttgggcaatggaattattaagtatccaaacctcaacatcatgtagtctacctgttttacaaatctgcacatgtaccttaaatataaaataaaaataataaaatgttttttggtataa

SEQ ID NO: 1255 - DNA, 168 bp, Homo sapiens
tatgaatgtcctgtgtgttggaaagcttttagccagaagtcacagctcataatacatcagagaacgcacacgggagagaaaccctatgcatgcactgagtgtggcaaagccttccgagaaaagtcaacattcactgtacatcaaagaactcatactggagagaaaccc

SEQ ID NO: 1256 - DNA, 2512 bp, Homo sapiens
cagggcgggacttgtggcgtcttcgcagcggtcattttggctgccctcccggaggtccgttctgtctgtcagccgctttggtacgctgcatcgggatcgaagtgacggaccgtgaaggcgcgagagtcaggtctgagggtcgggggcagagccgcccgcgaggccggcctggggatagcgatgctcgggttccccccgggtcgcccgcagctcccggtccagctccgcccacagactcggatggcgaccgcactgagggacccggcttcggttcccatagctacagaggtgcttttcaaacttacacagggaagtgtgacctttgaagatgtggccgtgtacttctcctgggaggaatgggatctccttgatgaggctcagaaacacctgtacttcgatgtgatgctggagaactttgcacttacgtcctccctgggttgttggtgtggagtggaacatgaggaaacaccttctgaacagagaatttctggagaaagagtgccacagttcaggacttccaaagaaggttcatcttcccagaatgccgactcctgtgaaatatgttgcctggtcttgagagatattttgcacttggctgaacaccaaggaacaaactgcgggcagaaactacacacatgtggaaaacaattctacatcagtgcaaatcttcaacagcaccagaggcagcacattacagaggcacctttcagaagttatgtggacactgcctcgtttacacagagttgcatagtccatgtgtcggagaaaccctttacctgcagggagatcaggaaagacttcctggccaacatgaggtttctccatcaagacgccactcaaacaggggagaagccaaataacagtaacaagtgtgcggtggccttttacagtggaaaaagtcatcacaactggggaaaatgcagtaaagcctttagccacatagacacacttgttcaggaccagagaatcctcactagagaaggactttttgagtgcagtaaatgtgggaaagcatgtacgcgaagatgtaacctcattcagcaccagaaagtccacagtgaagaaaggccttatgaatgcaatgaatgtggaaaattctttacctactactccagtttcattatacatcagagagttcatactggagaaaggccttatgcgtgccctgaatgtgggaaatcgtttagtcagatatacagcctcaatagccataggaaagttcacactggagaaaggccttatgaatgtggggaatgtgggaaatcttttagccaaaggtccaacctcatgcagcatcgcagagttcacactggagaaaggccttatgaatgcagcgaatgtgggaaatcttttagccaaaactttagcctgatctaccaccagagagttcacactggagaaagacctcatgagtgcaatgaatgtggaaaatcctttagccgaagctccagcctcattcaccaccggagacttcacactggagaaagaccctatgagtgcagtaaatgtgggaagtcatttaagcaaagctccagcttcagttcacatcggaaagtccacacaggggaaaggccttatgtgtgtggggaatgtgggaaatcctttagccatagctccaaccttaagaaccaccagagagttcacactggagaaagacctgttgagtgcagtgaatgtagcaaatcctttagctgtaaatctaacctcattaaacacctgagagttcacactggagaaaggccttatgagtgcagtgaatgtgggaaatcctttagccaaagttctagcctcattcaacaccgcagagttcacacgggaaaaaggccttatcagtgcagtcaatgtgggaaatcctttggctgcaaatctgtcctcattcaacaccagagagttcacattggagaaaagccttagctgtactgagaatatgcaatttccttttagtgtaattatactgaaggagtacacctgtgagagagacaagtacctgatttggaagccccaacatctaaggatatacagtgggcggattccccttaagttccaggtatgtgttacactttctaacatgccatttagaaagtgttagactttctcacctgccatttatggctcttgccgtttatgtcactgacagtttctgaggcagaagccgtatcatgtctaccacctgtgaggtccacacagtgtgtatcatttacctcctgaacctgctcaaggaagcagacctctgcttctccccatttgctagaagaaatcatgaatagtctgagtcttcctctctgacaagttagggcatggacttgacccagctttgtgccagagaacccaatatgagtgttgttggcagcttgccaagaaggactgtctttttcaagacatactggtttcatgtgacacctccatggatttttttccagcctctaagtcaccaacttgggaactgcttgtctcacgttgctttgttttttacaataataaaagcattattatttaagctacctttatcttg

SEQ ID NO: 1257 - DNA, 2796 bp, Homo sapiens
gcggcggcttccaacaggctctggggcgccgagcggacaggaacgcagcacgggggctccgaggcggggtctgggtgttgaggggcgactggagccatggcggagtcggcgcctgctcggcacaggagaaaacgacgctccacacctttaacttcttccacacttccttcacaagcaacagagaaaagctcctattttcagaccaccgagatttcactctggacggtggtggccgctattcaggctgtggagaagaagatggagtcccaggctgcccggctacagagcctggaggggcgcacggggacagccgagaagaagctggctgactgcgagaagatggccgtggagttcgggaaccagctggagggcaagtgggccgtgctggggaccctgctgcaggagtatgggctactgcagaggcggctggagaacgtggagaacctgctgcgcaacaggaacttctggatcctgcggctgcccccgggcagcaagggggaggcccccaaggtgtccaggtcactggagaatgatggcgtctgtttcaccgagcaggaatgggagaatctggaggattggcagaaggagctctacagaaacgtgatggagagtaactatgagacactggtctctctgaaggtccttggccagacagagggagaagcggagttgggtacagagatgctgggtgacttggaagaggaaggtcctggtggtgcccacccagcaggtggggtcatgatcaaacaggagctacagtatacacaggaaggccctgcggatcttcctggagagttctcatgcattgctgaagagcaggctttcctgagcccagagcagaccgaactctggggtggtcagggcagttctgtcctcttggaaacaggtcctggggactctactctagaggagcctgttggtagtagagttcctagcagcagcagaactgtgggctgcccgaagcagaaatctcataggcaggtacagctggaccaggaatgtgggcagggcctgaagctgaaaaaggacacttcccgcccctacgaatgttctgagtgtgagatcaccttccgctataagcagcagctggccacacatctgcgcagccactctgggtgggggtcttgtacacctgaggagccagaggagagccttaggcccaggccacggctgaaaccacagaccaaaaaggccaagctgcatcagtgtgatgtgtgcctgaggagcttcagctgcaaggtgagcctggtgacccatcagcgttgccacctgcaggaggggcccagtgccggccagcatgtccaagagaggttctcacccaacagcctggttgccctgcctggccacatcccttggaggaaaagccggagttccctcatctgtggttactgtggcaagagcttcagtcacccatctgacttggtgcggcaccagcgcatccacacgggtgagcggccctacagctgcactgagtgtgagaagagctttgtccagaagcagcacctcctgcagcaccagaagatccaccagcgggagcggggtgggctggccctggagcccggaaggcccaatggcctgctttaagggtgcagcccctcgcccgtctgggggatggaggggggtggcattggttcccccgaagagacactgcagtcagggactgagttcttcctgagggcagttgtttgtgattgccttcccttgtcccagtaccaagccaagcccaaaggctgtcctgaaaaccctgtggaagaagagtccaggccaggtcttcatcctgctgccaagtttgctgtttcttggcaccttcaggtctctggttttctcattcatgccaatgcttgtgggctggggttggcgttctgaccccacagggactggtggctggttccagggctcgtcccggcatttcatgtcttcccacggggttgagtcgggccataggggtgagcagctgcctggaagagttctgggaagtataaccctccattttttcttgttttataatctctttgtttaataataagtagaagaaataatttaaatgaactgcttagccctgctctgaagaaccttttttggaattagattttagttgattttttaaagaatacagcccaacacttgttttttacattttaagagttgtagaagttgttcctaacttggggactggacctaccctctaggagggagttgttaatggggctcttttagcccactgatgcttacttaggccggagagcaggggacacggtgctaggttccctcgtgcagtgcctggtgctctcaaattgtctcaaaaggaccaagaggaaaagagtcggaggggtagaccctgcagccctgttgagaagaaagattccagtgaagttgctgatggtatggctgtggtctgggacttgcggtgtctcggcatacccctctcctcttcccacctcctcctggctatgttctgcagcctcccagagtagaaaactactttgttacttaaggttgttcaccttgtaccagtggttatttgagtttgttcctattacaccaatccttacttgaggtggttcggattacagtttccaaatgcattctgggattgcctattccagagagggtacagaaaaagcacacagatggcttgtctcaggagtgttgaatgtgtgccccgctgctgtctggggggatgggagtgggctctggggtcatatgtgaacatccccttggatgatttgcggttgcttagaataaaacttgctactagcaaaagaaaaaaaaaaaaaaaaaaaaaaaaaaaaaaaa

SEQ ID NO: 1258 - DNA, 3200 bp, Homo sapiens
ttcctgttcattggccatcggtcatggagaaggcgggctcagtggacgaacggctttctgggagctggggaatgcttgcgtacgtagtttcccagcgagccccgcgaggacttccggcgccgggagctcgcggcggaagtgggatctcctgggccgtagtgggcgttgtgtgtttcgggggcgaggctgcggtggacagcgcggggctccggctggctcgccttcccgcctgccgtgtcctgctgagcgaccctggagtacacatccagatgccagcccagctaccacaggggatccctctgggagactgaaagtacaggttctggggcccaggttgaagccgaccaaccctgagcctcaggccaggggaatggcagcccccttggaggcccaggaccaggcccctggggagggagaagggcttctgattgtgaaagtggaagattcctcctgggaacaggaatctgcccagcatgaggatggcagggattccgaagcctgccgccagcgcttccggcaattctgctacggggatgtgcatgggcctcatgaggccttcagccagctctgggagctctgctgccgctggctgcggcccgagctgcgtaccaaggagcagatcctggagctgctggtgctggagcagttcctgacagtgctgccaggggagatccagggctgggtgcgtgagcagcacccgggaagcggtgaggaggctgtcgccttggtggaggacctacagaagcagccagtgaaagcctggcgacaggatgtgccctcggaggaggcggaacccgaggctgcaggccggggatcccaggccacggggcctcccccgacggtgggggcacggaggcggccgtctgttccccaggagcagcacagccatagcgcccagcctcctgctcttcttaaagagggtcgtcccggagagacgacggacacctgctttgtctctggggtccatggacctgtggcattgggagacatcccattctatttctcccgggaagaatggggcaccctggaccctgctcagcgggatctcttctgggacataaagcgggagaactcccggaacaccaccctgggttttgggctcaaaggccaaagtgagaagtccctgctgcaggagatggtgccggtggtgccaggccagacaggcagcgacgtgactgtgtcctggagccccgaggaggctgaggcctgggagagcgagaaccggccgagggcggccctgggcccagtggtgggcgcgcgacgggggcggccacccactcgccggcgccagttccgggacctggcagccgagaagccgcacagctgcgggcagtgtggaaagcgcttccgctggggctcggacctggcgcggcaccagcgcacgcacacgggcgagaagccacacaagtgccctgagtgcgacaagagcttccgcagctcctcggacctggtgcgccaccaaggcgtgcacacgggcgagaagcccttctcctgttccgagtgcggcaagagcttcagccgcagcgcctacctggccgaccaccagcgcatacacacgggcgagaagctttcggctgcagcactgcgccaagagcttctcgctgcgctcctacctgctggaccatcggcgtgtgcacaccggtgagcggcccttcggctgcggagagtgcgacaagagcttcaagcagcgcgcgcacctcatcgcgcatcagagcctgcacgccaagatggcccagccgtggggtgagcagctggcttgccggaaacccgggggaggcccagccacggcacatcctgctttgttcaccactgggactctccttccatctgtggccacctcccgggctgtccgagggaccccagggtacctcacactcggagctcgcctgccctgcttggctctgaggacctgcccagcgctcaaagggaacggaagccttcccctcccgcccccgatcttgtcctctttcccccttctgcgcctagcgttcctcttcccctctagtttcctggagccccaacacattcctggcagggacagcagggtggcaaggactcaggtctaggtcccttcccagaagcccccgagcctcatttgactgtgtggctctttggcccccaccctgtggggtgggtccatgggtcaggcctctgccctaccaacctgtgcctttcagtgggcgtggaggactggccttggccccccagggggctgctggactttgggagagacagccacacctgtgggaccgcgggtcttagtcacggcggcaggggctttctggccccctcccactcccgtttccaggccatgaccactctgccctgtcctggccatacggactcggcctgcctttgccctcggcctacttgccctagcatgaggctctgagagccacctgcccaccaatctggtgaggataatggtggctccagcgacaggaggccaaccctggagaccaagaacagggcgcctggctgccatcttttcctccagaggtggggctgcaccagactcagcactagcactccatcagcactagcacctcactccatcagcactagcacctcactccatcggccccggcaccctgctccatcggcactggcgccctgctccatcggcactaatgctccactcggcgccccactccatcggccccgctccatcggcactaatgccccactcggcgccccactccatcagcactaatgctccactccattggcactaacgccccaactccagcggcactaatgacccgctcctttgacattggtgccccactccatcagcactaacgccctgctccatcggcactggtgtcccactccattgtcactaacgtccggctccatcggcactaccaccccgctccatcatcactatggtccagctccgtcggcactaccaccctgctccatcatcactacgtccagctccaatgcactggtgccccattccatcgggaataacgccccgctccaccggcaccagtgcctcgctccattggcaccaacgcccagctccaccggtactggctccctgctccatcggcactaacgccctgcttcattggcactttgctgctgcctcctgagcactgccttccatgaacagggacagaccagaggccctgcaagactccccctcagacctccaaagggcaacagaagagtattaataaacgtgaaaactt

SEQ ID NO: 1259 - DNA, 2668 bp, Homo sapiens
aagacctgggacttccgtttcggtccagccgggctgcggccattgtttgtgtggactgagtgttttggccatcccggtccactctcacaggctccgttaagtgacatgaactctcaggaggactgagccagaagcggacagggcaagacgagctgtgcttgaaggaagaggggcagaaaatcgagggtcagggactgagaagctactccggtttagaaaccccagagacacccgtgtagatgggtacatcacggcttctctcccacgttaagacttaataaagaaagcctgatctttgaccagatggcagtaacatttgaagatgtgactattatttttacatgggaggagtggaaattcctggattcttctcaaaaaagactctacagggaggtcatgtgggagaactacacaaatgtcatgtcagtagaaaactggaatgagagctacaaatcccaagaagaaaaattcagatacttagaatatgaaaatttttcctactggcaaggctggtggaatgctggcgcccagatgtatgagaatcagaactatggggaaactgttcaagggacagattccaaagacctcacacagcaagatcgttcccagtgtcaggaatggttaatactctccacacaagtaccagggtatgggaactatgaactgacttttgaaagcaaaagtctcaggaacttaaaatataaaaattttatgccttggcagtccttagaaacaaaaaccactcaagactatggtagagaaatctacatgagtggttcacatggttttcaagggggcagataccgtcttggcatatccaggaaaaacctctccatggaaaaagaacagaagctcatagttcagcattcttatatcccagtggaggaagcccttccacagtatgttggggtgatatgtcaagaagacctactgagagattcaatggaagaaaagtactgtggatgtaataaatgtaaaggaatttattattggaactcacggtgtgttttccacaagagaaatcaacctggagaaaacctctgtcaatgctccatctgtaaagcatgcttctctcagagatcagacttgtatagacatccaagaaaccacataggtaagaagctgtacggatgtgatgaagttgacggtaactttcatcagagctccggagttcactttcatcagagagttcacataggggaggtaccttatagctgtaatgcatgtggtaagagcttcagccagatctctagtcttcacaatcatcaaagagtccacacagaagagaaattctataaaattgagtgtgataaagacctcagtagaaattcattacttcacattcaccagagacttcacataggagagaagccttttaaatgtaatcagtgtggtaagagttttaatcggagttcagtacttcatgttcatcagagagtccacacaggagaaaaaccatataagtgtgatgagtgtggtaagggtttcagccagagctcaaatcttcgaattcatcagttagtacacacaggagagaagtcttataaatgtgaagactgtggtaaaggctttacccagcgctcaaatcttcaaattcatcagagagtgcatacaggagagaaaccttataaatgtgatgactgtggaaaggactttagtcacagctcagatcttcgcattcatcagagagtccatacaggggagaaaccctatacttgtcctgaatgtgggaagggcttcagtaagagttcaaagcttcacactcatcaaagagtacatactggagagaaaccctacaaatgtgaagagtgtggcaagggattcagtcagcgttcacatcttctcattcatcagagagtccatacaggagaaaagccctataaatgtcatgattgtggaaagggttttagtcacagttctaatcttcacattcatcagagggtccatacaggagagaagccttatcaatgtgctaagtgtggtaaaggtttcagtcatagctcagctcttcgaattcatcaaagagtccatgcaggagagaaaccttacaaatgccgtgaatattataagggatttgatcataattcacatcttcacaataatcatagaagaggaaacttataaatattgttcatttagttaacagctttaatcaaagtttacctaacctttaaaccctataaatcctgctgttaaggaaatcttataaataacacaagtaatcccaagcaacatttatagtttcccctatctcccactaagaattatttgcttcaaaaggagatctttagaaaaaaccctatatatttaaaattatagtgtatttttctttacctactataaatataatacagtcataaatatattaaacatttaaggagaaaactcttcattctatttcattctagtctttttttctgtgcattttaatgtgcatgaaattgtgtgttcaattttgtattttcactgtcttcaaaatatttacttaaattttggtttgaattgaaactggttggccaactgttaaacgacatctcttaactcccctaaaaactccctaggaagtaacagaaaagatggaaacacatagaacttaaaactcagttttggccggtagaattcaattgtttatggacaaaagccacctaataaaagataggaaagcatt

SEQ ID NO: 1260 - DNA, 3658 bp, Homo sapiens
tgcagaaagggacggggctggcaaaggcctggtctacctcaccgatccgggtcgcgggggctcctagggggttccttccacagctggtgcgcgtgcgcaagagtgcgtcgaggttgttccgcggcaatttatgaaactcggagccggcagtgagttgagggttcggcgaggtcagggattcctagttgcagcgtgattaccaacgccagctcccttcactgtccaagacagcgattccgcggctcctctgagaactggcgctttgttcatcatttgccacttaagctacttgcagtcacgtcacaccttggatctctatcatcaaaactattccacctcggaaatcttacctaaatgcagcatgccatcctgaacgtctctccctgtcctagctctgtaactgtttacattgctcaggtacctgaatattggctttgtgtctaaagtttctggaactttcctccttaccgtgaaataacttggcttaaatcacactgcatatagtacacaggtgcttagctcaagcctgagaattactgcaatctagtaaggcggatttgaactactgtgggagttctatttaggaagatgcagcctctgagcaagttgatggctatctcaaaacctcgaaacctgtctctacgtgaacaaagagaggttctgagagcagatatgtcttggcagcaggaaaccaaccccgtcgtggagacacatgactctgaggcatctcgtcaaaagttcagacatttccagtatttgaaagtgtctgggccccatgaagccctgagccaactctgggagctctgtcttcaatggctgagaccagagattcatacaaagaagcagattatagaactgttggtgctggaacaattcctggcaatcctgcctgaagaagtcaggacttgggtgaatttacaacatccaaacaacagtaaagatatggtgaccctcatagaagatgtgattgaaatgcttgaagatgaagatatgccctgcaaggactctgccctgcagatggggagcatcaaggagaaaatgaaagctggctcacgaacaggcaaaccacaggaaccagtgacattcaaagatgtggttgtggaattcagcaaggaagagtgggggcaactggactctgctgtaaagaacctgtacaggaatgtgatgctggaaaactttaggaacctgaattcattgcgtaaagcacatctactttccaaaccatttgagagccttaagttggagagtaagaaaaaaagatggataatggagaaagaaataccaaggaagactatttttgacatgaagagtatttctggagaagaatcatcccatggagtgattatgacaaggcttaccgaaagtggacacccttcttcagatgcctggaaaggtgagaattggttatataggaaccagaaaaaatgggacataaatttgccacaagaggctttcattcctgagacaatttacactgaggaggaagattttgaatgtagtgaaaataagaaaagctttgatattaattcagttagctcaatttgtgctatacaagtgggaattccttcaagaaaggggtctccaaaatgtgataagtttaaaacttacttcaaatttaatttagactcagtaggtaagcaacattcagaatatgaatatgggaatgacttgagtttgagtacagatattcgacaccaaaaaagtcatactacaatgaattcctatgaatgttatcaatgtgggaaagccttctgccgaagttcatcccttattcgacatcagatcattcacacaggagagaaaccctataaatgcagtgaatgtgggagattcttcaaccgacgtacaaaccttactaagcatcaaaaacttcatgctgaagcaaaggcctgcacaagcaataaatgtggaaaggccttcagtaaaagtgaagacagtaataatccaacactccattttggaaacaatttctatcaatgtgttaactgtggaaaatccttcaaccggagctcctctcttattcgacaccaaatgattcacacgggagagaaaccattcaaatgtaaggaatgtagtaaagccttcaacaggagttcaaaccttgttaaacatcaaaaactgcatactcgagataagtcctgaaaaaagaaaaaatgaaagattaccttcagtcagaatgcagaactcatttaacatcatgaatttatgctggataaaatctcatgaatataatgtaagaaaacatttgtcagatttttctttaaatgatatcacagaattaatgttggatagaaatatcattggatagaaatctgtttgaaggaattttcctggttttcagatgaagccataaggctttggagttaaaccacagtatcaccatacaagtatttgtttatcattattttgatatccattaccctcacctctccctagttcataaataggtctatagcatactaatatccacctgatttattgacgaagtagacattaggcaaagccaaacaatactcttggagttgatatttaataaaactcagcccttttaagaaggtcacaagaaatcattagctcatgcgaatataagagaatacttctaaggacagaaatctctgaatcaatggctaagacaacagtaacagccatttactccactcctgacaataccctttgttgtcttgctgttgaatggagactagagttgggaaagggttatcaactgcaatgggagaagtatgtattgctgttaatctatatgtattcttaaaatctgcatttgtttatagcaggtccttgaaaaatgtttttgttttgttataatgttataattgttatgatgttgatgagaaaaatatcgattcccagccagggacactgtgtggagttcgcacactctccctatgtctccgggtgctccagtttcaaaccccaaagatgtatacattaggttaattgacatatctaaattatctcagtctgagtttgtgaggaagtgtgccctgcagtggaatggctcctaatcagggtttgttcccaccattgccctgagctgctaggatgcgctctgtccacccatggccctgtactggaataacagggtaaataattatcttatctgtttttattaatccgtcttaaatgtgtatatagctcagatttattttaatgtctgatattggaagcgtttggggtctttagaagtttgatgatgttgtgaccagacatttgccttaggaacttaactcttgtttgtatccattagtctatggtaaaattggttttgttatacatcatttcacttaaagttgcagttcctaagaacctattgatgatgttcagtgcagacttactgtacctttgggaatttaggctggagagacgtccatagccttaggtatatcatttataccagacattatgaagttattaaagtctcctatactctgtacaccagaactgtgtcttctgtaaactacctcaggatcccatctggttcttgagccaagaagtatgacttaatctgccccaaaaaattcacactggagacattcccaattaatgatgatggtagctttttgtgaaggttcataccttattcaaaggcagaaaaggtatactggagtgaactcctatgattaaataatgtcaaaatcta

SEQ ID NO: 1261 - DNA, 5747 bp, Homo sapiens
ctcttttccctcacagcccgggcgccgggcggcgagtgcgttagtcggccgggacgcggagctgtgtgcatctcctacgcgggctcgctcgctcccgggagccgcgcagcttccccggcggtggcaggagcggcgaagagcgccatcagcgggcccttacggccccaggcctcgcggcgcgcggtccgctcgccctcctcgtccgcccaacctgcggcctgtggaggcgtgaggcgacgacaggcgagcgcctcgagcagcgttagccgctgcggccgccggtcctccctccacctcctcctcggccccccctcgcttccctcctcccacttcccgagctccggcgtgtcccggccacgctcgacgctgctgcaggaacaaaggaagaccccgcggcggcggcggcgccacctccgcctgctgctccgacccgctcccggcccgcggcggcggcaccagggcgcccggctcagccttcccggaggcctcggcccggcctcatcgtgccggcttcgcgcgcgaacccggctttcgcatttgggaccctgcaggaaaaatatggctcaggagactaaccagaccccggggcccatgctgtgtagcacaggatgtggcttttatggaaatcctaggacaaatggaatgtgttcagtttgctacaaagaacatcttcagaggcagcaaaatagtggcagaatgagcccaatgggaacagctagtggttccaacagtcctacctcagattctgcatctgtacagagagcagacactagcttaaacaactgtgaaggtgctgctggcagcacatctgaaaaatcaagaaatgtgcctgtggctgccttgcctgtaactcagcaaatgacagaaatgagcatttcaagagaggacaaaataactaccccgaaaacagaggtgtcagagccagttgtcactcagcccagtccatcagtttctcagcccagtacttctcagagtgaagaaaaagctcctgaattgcccaaaccaaagaaaaacagatgtttcatgtgcagaaagaaagttggtcttacagggtttgactgccgatgtggaaatttgttttgtggacttcaccgttactctgacaagcacaactgtccgtatgattacaaagcagaagctgcagcaaaaatcagaaaagagaatccagttgttgtggctgaaaaaattcagagaatataaattacttcttgtgaagagactgaaactttgtttttattttaatatatcgtaggaaaacattaaagagcagatgcatggccatttttctttgatgttctccagagttttacattacacttgtctgtcttataattgatattttaggatgtttgggtgtttgttacaggcagaattggatagatacagccctacaaatgtatatgccctcccctgaaaaaaattggatgaaaatctgcacagcaaagtgaaacacacagataataggaacaaaatgtagttcccatgtgccaaacaaaataaatgaaatctctgcatgtttgcagcatatctgccttttgggaatgtaatcaaggtataatctttggctagtgttatgtgcctgtatttttttaaaatggtacaccagaaaaggactggcagtctacttctaccatagttaaacttcaccctctttaatttcacaacatattctttggaagcaggaagaaatgctcataaagaggatcagaccttctttcccgtgaaaccagtatttggcgccatatataagcctggttaaattggtcatctaaagctgtcaaataagacattctgtgaaaggtaaacatcgaaactggttataagtaaaaccatcaagccaacaacagggtcttgagataacctttgaagcttattgtactggcctgcaccagaagatgtctgcattactcattgctaaaaatgtgtagcacagaactgcactaggattaatttgtttacaagaagaaatttaaactctacgtttggttttcacatacagcagctctattgaataacatgcatctgaattttaagttgcaaaggtatctgaataatttttcatgtgcatcttttgtcgaatgttttggttcaagaaagaatgtttaaagctttttaaaagacttcagttcttaatgtaactgtacccttctgcatggaaaatcataaccaacatggctgcagtagacttcttagtggtatccagcaccacttgcagagggctgctttatcatattgtacttgggtgtaggactctagtgttcttgggtgtattgcatgggctgcattatctacagcattgtacaataacaactagaaaaggcagtatacttcactgatgcttgtctggtaataatcacttctgtgttataatggaaggttttttgtgatgtatgaaacttgtgttttttatatataaatgagtatagttagtgttgtggtaatgcctgttttcatctgtaaatagttaagtatgtacacgaggcactacttctgatttattgcaatgttcagtcctagtttttacttttattcttaaagcattcagttttgctttcaattttatgtaccttagttctgagttagacctgcagatgtgtacagatagttcatatttatgtattgcacataatcatgctattcagcattgatgctatattgtattatgtaaataataaaagccatgtacagagggaaacttcacttgttcattgggtttttaagccatagttggagtcctaaagggggaaaattagaaaatgttactttacatggctatataattttttttcctttgccatcgctgaacttgttcaagtgataatcaagagatattagaagcatttgcaggtatgatacctgataggcagtttatttttgaagaattcaataggcacctttgggattaaaacaattttaaaatttgagaaagatgaaatttgaacaattatggcctacctcgcttctccatgttgtaaaagatgatgttttatgacaattctgaagaagaaagtaggtatgacttagtttacaaaaagagttctgttttatttctgttttgggtttggctctaatacagagattcacccatggacttggtctctgtagcgtttatgccagatcataaagaacaaggggtgacaggtacatgttgactttacctggggtaaatgattaccagagtgcaactgttgcttctctgtgatggagtttggggtggaaataccctagttttatctgtcagttctttgcatgctgctacttttgcttcaagttagggaggtacatatgtatgtcaaagttcctatactgacatagggtagtatttctctgaatatgaaaagtcacaattgagttgaaaatttagaagttgaagatttagaagggcaacttaatttttcaagttaaaaatggaagtaagagtggtatagagaaggtaagatgagccctcggactccatcactctgaaggtctgagtagtagcaagagatagatttttgtttggccaggctgcagtgcaatggcgtaatcttggctcactgcaacctctgcctcctgggttcaagtgattctcctgcctctgcctcctaagtagctgggatcacaggcaccagccaccacgcccagctaatttttgtatttttaatagagacagtttctccatgttggtcaggctggtcttgaactcctgacctcaggtgagctgcccgcctcggcctcccaaagtgctgggattacaggcgtgaggcaccgcacccggccaatcagttttttttgttttttttttgtttgtttgttttacaagaaacattaaaccagatcagaacaaagatttgtcagggttgtccattgactggggagaaagggaatcagtgtgtaaggcacctgagaggactcagttctacccaaattcttgcattcaaacctgaatgcaaggccatgaagtcctttgaaatgtacagatattaagcaatttaataatataccatgtttcccttacataagcagacaaatatttacacccccatgacctgaagttttgttaggctgtgaccacatgaattcgcagtataaatgggtgagtcctttttgaaaacctcatcttcagtgtgcctgatctgtaaaactagagcctcaggtttgatcctaggtaggcttcccacaacgtggggaaaattagtttgtgagggaaagctgtttctgagcattatggcatagtgattaagatgagggaccctggaaccagcccgtgattttgggcaagttattttaggtccactttggactgcttcatctcttaaatgaagacagcaaccaccttcaggagtgtgaaggtgacaacacttaaaactgtgcctggcacattgtatttgctattgtcttaatgttctggaataatggtttccataacttgggaagaaaactttgagaacaggattggttacatcaagttgtatagtgaaaagataaagatttgttatttaaacttgcagtttaaagtcattagaatcattcttttccgtaaggctttctttgcaagagatctgcattaaataaagttgctaggaaataactaaaattggggaaataatctaataatagcaagatgttaagcatactattattgtattttgggggttggtaataacattcacatggatttatcaatacacactgagaagcaaagcctctcaagctgtcccatatcctccatttcaaaggcacacatacattttaggtaactcataatttagaaaggttatttaatcttttccacatgtaaatatttgaatatgtacaaagacttgatttgactcttgtctgtttttgttttgttttgtttgtttgagacagaggctccgtcgcccaggctggagtaaaatggcatggtctcagctcactgcaagttccgcctcccgggttcacgccattctcctggctcagcctccggagtagttgggactacaggcacccgtcaccacacctggctaatgttttttgttttttgggtttttttgtatttttagtagagagagggtttcaccgtgttagccagggtggtctcgatctcctgacctcatgatccgcccaccccggcctcccaaaatgctgggattacaggtgtgagccactgcgcctggccgactcttgtctgtttgaatgcaaagttctcaatagtggtttttgtccataagtattaacttataattttggagagtgataggtatggttgctggttgattagcaataagattatgtagccttaaactagctagaagagtttgcatgggtgaggcaacaggctgttaacaaaaagaaactggaaatacagtttcccctgtttgtttctcctgtttgtacaatctgctttaaaaacaagtgaacatgcaccatgtcagtcatggtgaatcggccaacagccagcccttgccagttgacatcacagtctaagatgggaaactggtacagatagacatgaagagagcttagcagtggttgaggtggtgactaaatatacagtcattgaataaataccgtgtagcaaatgtaaaaaaaaaaaaaaaagtacaacagaatacaaaagtgccatttaatattttatagctatttctatgcacaagtgctggttttaaatttatataaaagcaaagactgtttctgtgttttcttccagagtatttctgttacagccatagaagtaaagttaataaatgtaagactttttttgtttaaaaaaaaaaaaaaaaaaa

SEQ ID NO: 1262 - DNA, 5653 bp, Homo sapiens
gacaaagagaactaatgctttgtgctgattcatatttgaatcgaggcattgggaaccctgtatgccttgtttgtggaaagaaccagtgacaccatcactgagcttcctaaaagttcgaagaagttagaggactatacactttcttttgaacttttataataaatatttgctctggtttttggaacccagggctgttagaggggtgagtgacaagtcttacaagtggccttattccaactccagaaattgcccaacggaactttgagattatatgcaatcgaaagtgacaggaaacatgccaactcaatccctcttaatgtacatggatgggccagaagtgattggcagctctcttggcagtccgatggagatggaggatgccttgtcaatgaaagggaccgctgttgttccattccgagctacacaagaaaaaaatgtcatccaaatcgaggggtatatgcccttggattgcatgttctgcagccagaccttcacacattcagaagaccttaataaacatgtcttaatgcaacaccggcctaccctctgtgaaccagcagttcttcgggttgaagcagagtatctcagtccgcttgataaaagtcaagtgcgaacagaacctcccaaggaaaagaattgcaaggaaaatgaatttagctgtgaggtatgtgggcagacatttagagtcgcttttgatgttgagatccacatgagaacacacaaagattctttcacttacgggtgtaacatgtgcggaagaagattcaaggagccttggtttcttaaaaatcacatgcggacacataatggcaaatcgggggccagaagcaaactgcagcaaggcttggagagtagtccagcaacgatcaacgaggtcgtccaggtgcacgcggccgagagcatctcctctccttacaaaatctgcatggtttgtggcttcctatttccaaataaagaaagtctaattgagcaccgcaaggtgcacaccaaaaaaactgctttcggtaccagcagcgcgcagacagactctccacaaggaggaatgccgtcctcgagggaggacttcctgcagttgttcaacttgagaccaaaatctcaccctgaaacggggaagaagcctgtcagatgcatccctcagctcgatccgttcaccaccttccaggcttggcagctggctaccaaaggaaaagttgccatttgccaagaagtgaaggaatcggggcaagaagggagcaccgacaacgacgattcgagttccgagaaggagcttggagaaacaaataagggcagttgtgcaggcctctcgcaagagaaagagaagtgcaaacactcccacggcgaagcgccctccgtggacgcggatcccaagttacccagtagcaaggagaagcccactcactgctccgagtgcggcaaagctttcagaacctaccaccagctggtcttgcactccagggtccacaagaaggaccggagggccggcgcggagtcgcccaccatgtctgtggacgggaggcagccggggacgtgttctcctgacctcgccgcccctctggatgaaaatggagccgtggatcgaggggaaggtggttctgaagacggatctgaggatgggcttcccgaaggaatccatctggataaaaatgatgatggaggaaaaataaaacatcttacatcttcaagagagtgtagttattgtggaaagtttttccgttcaaattattacctcaatattcatctcagaacgcatacaggtgaaaaaccatacaaatgtgaattttgtgaatatgctgcagcccagaagacatctctgaggtatcacttggagagacatcacaaggaaaaacaaaccgatgttgctgctgaagtcaagaacgatggtaaaaatcaggacactgaagatgcactattaaccgctgacagtgcgcaaaccaaaaatttgaaaagattttttgatggtgccaaagatgttacaggcagtccacctgcaaagcagcttaaggagatgccttctgtttttcagaatgttctgggcagcgctgtcctctcaccagcacacaaagatactcaggatttccataaaaatgcagctgatgacagtgctgataaagtgaataaaaaccctacccctgcttacctggacctgttaaaaaagagatcagcagttgaaactcaggcaaataacctcatctgtagaaccaaggcggatgttactcctcctccggatggcagtaccacccataaccttgaagttagccccaaagagaagcaaacggagaccgcagctgactgcagatacaggccaagtgtggattgtcacgaaaaacctttaaatttatccgtgggggctcttcacaattgcccggcaatttctttgagtaaaagtttgattccaagtatcacctgtccattttgtaccttcaagacattttatccagaagttttaatgatgcaccagagactggagcataaatacaatcctgacgttcataaaaactgtcgaaacaagtccttgcttagaagtcgacgtaccggatgcccgccagcgttgctgggaaaagatgtgcctcccctctctagtttctgtaaacccaagcccaagtctgctttcccggcgcagtccaaatccctgccatctgcgaaggggaagcagagccctcctgggccaggcaaggcccctctgacttcagggatagactctagcactttagccccaagtaacctgaagtcccacagaccacagcagaatgtgggggtccaaggggccgccaccaggcaacagcaatctgagatgtttcctaaaaccagtgtttcccctgcaccggataagacaaaaagacccgagacaaaattgaaacctcttccagtagctccttctcagcccaccctcggcagcagtaacatcaatggttccatcgactaccccgccaagaacgacagcccgtgggcacctccgggaagagactatttctgtaatcggagtgccagcaatactgcagcagaatttggtgagccccttccaaaaagactgaagtccagcgtggttgcccttgacgttgaccagcccggggccaattacagaagaggctatgaccttcccaagtaccatatggtcagaggcatcacatcactgttaccgcaggactgtgtgtatccgtcgcaggcgctgcctcccaaaccaaggttcctgagctccagcgaggtcgattctccaaatgtgctgactgttcagaagccctatggtggctccgggccactttacacttgtgtgcctgctggtagtccagcatccagctcgacgttagaaggaaaaaggcctgtgtcatatcaacacttatctaacagcatggcacaaaagagaaactatgagaattttattgggaatgcacattatcgaccaaatgacaaaaaaacttgattcactaattagggggaaaaaaggtcttggtggatgtcagtgcttactccccatgaaattaaattttacttcatcctttgagaagcgaatggtgaaagctactgaaataagctgtgattgtactgtacataaaacatatgaggaatctgcaaggaacactacagttgtgtaaagttgttctgttaacttttgtaccaaatagcaatacaaactagttggaacagttggaacttacatacatggggactggaaatctctattttgtccctgaataatatttttcttagaattgaccaaataagaagtggaatttttgcatacttgagcgctgctgaaaagaaatcatttgggttgggtggggcgggatgggggaaaagtatataatgcttgcacctcaggtaaaaatctgtaaatatctaagttgtaaacctgcttgttcaaatactgtgtgtattccttttctctaatgcagctcatcacttggagcagtttctgctattgtgctctttcatttaaaatgtatgtttttttttttttaaactgtcaatgattttgtattatgttgaatccacccaaatctattgttgtcttaaaattgttaatggaagtattgaccctctatgatatgtgctgcagatatcgaggtcagccattcggaagctggcagcattttatcgcaactttgagcatctcagatggggaaggcaccttcttcctcgcctctccagattgtcctggaacctccaggatccttgactgagggcgttgggatggcttgtaggatttttaagagagtgtgtctacagacaagcattttctctgtagagcagccacacgttgtataaacataaactgtatgtgcagttatttaaatttgtttctgtcaaattaatcatttttgttggacgattcagtggcgggggggttttgcctaaattagtatataaaaacaaaaatgctaaattatatctgtgaattgcaggtattggggaacagttttaagggaaattttggggggaacattttaggtttgtatttggtagtcttaatgtatctggcatttgggtgaactgtggacatactagagttgattatagacacattgattttgaataaggaactgctggccgagcccgctgggagtctagaaagagaaaatctgtttctagacctcagttattttcccatttttggttgttttgaagcagtaacatttttctcagtgcacatgcaatttgggttttagagaagatggccaccagctggcttcctagatattttaaacttttgttctttaatatgctgtccatggctgagtttattagtacatgggcttagtgaccacaaaatattttattaagaaactgtttcaaaaataaatttgcactgttcatttttctggcctcgctgttctccatagagcaagggtaatcctagaaaaaattttttttttttaaattatgcaacgtaagatgtcctccttgatagaagtcttagctcctgtgttacaagggagaactcatttgagatcagtctgttggcattgcaatgaagtgctttgtatcaggaaagtgtacactattgaccttttttcctgttcacaagctgagccatatgtacataatctagattttgttttcatagttttgcacttttatagcctatttttgaagattaacacatttgcaagatgattgactcaatctttgcctaatccaatgagtgttacagagagcttgctgtgactagaaccataaatcttaaagggggtatgtgataatagagggctggaatttaaacctgtatttaaaaaaaagaatcaccaaatctatttgaaaacaagtcgatttgtattatgctggaattttttgggctttcagatttctctttttaaccacatttctgaatgtataaaaataccaattattttcctacagccctttgtacttcaaaatatgtttttgtgtccatcagtattaactattggtatactactggttttatatttttttttctttgagacaacagtacatataatagaggtacaattcgttggatttttgtttatgtatttatttcattccagtttgatttattttaattgttgatacttaagttgtcgaacagtagacattacttgttttatttatgatatatttcagcttaaagttatgttattatatgtggaagtgtaaatatagatttggtgttttgcaaaaaaaaaaaaaaaaaaaa

SEQ ID NO: 1263 - DNA, 3098 bp, Homo sapiens
aaaccgcccgcaccccgcccctggcggccgcctctcgcggctcccggggtccccagctccctgtccccggagccagagcccggctcccgcgcggctcccagccccgccgcgccgccccccgcatgctaatggccgggccgcctcccgccgcacacaatgcgggccagggccgggggcgggggaccggggagggggcgggggccgggccgggggcgggggggccggggcccggcgcatctcccccggccccacgtaacgctgacgcccgcgccgccggcccgccgcccgccgccgccgccgccgccgccgcccgctccgccgccgcccgcccggggctcctccacagcacctgttgccttcattagcagcttttcctcctcttccctgcacttcccagaaccaaagaatgtgaagggggtccatggagggctcacgtccccgcgccccgagcggccacttagcgccgtcgccgccggctttcgacggcgagctggatctgcagcgatactccaacgggccagccgtgagcgcagggtcgctcgggatgggagcggtgagctggtctgagagtcgtgcaggcgaacggcgcttcccctgccctgtatgcgggaagcgcttccgcttcaactctatccttgctttgcacctgcgggcgcacccaggagcccaggccttccagtgccctcactgcggccaccgcgcggcgcagcgggctctgctgcgctcgcacctgcgcacacaccagcccgagcgcccacgtagtcctgctgcacgcctgttgctggagttggaagagcgcgcgctactacgcgaggcccgactggggagagcccgaagctcagggggcatgcaggccacccctgccactgagggtctggcgcggccccaggctccttcatcgtccgccttccgttgcccctactgcaaaggcaagtttcgcacctcggcggagcgcgaacgccacctgcacatcctgcataggccctggaagtgcggcctgtgcagtttcggctccagccaggaggaggagctgctgcaccacagcctgacggcccacggggctcccgagcgtcccctggcggccacctccgctgcgcctccgcctcagcctcagcctcagcctccaccccagcccgaacccagatcagtcccccagccggagccggagccggagcccgaacgtgaggcaaccccgaccccagctcctgccgctcccgaggagcccccagcgcctccggagttccgctgccaagtgtgcggccagagctttacacagtcttggtttctcaagggccacatgcgtaagcacaaggcctccttcgatcatgcgtgtccggtgtgcggccgctgcttcaaggagccctggttccttaagaaccacatgaaggtgcacgccagcaagctgggcccactgcgtgccccggggcctgcctccgggcctgcccgcgccccccagcctcctgacctcggcctgctggcctatgagccgttgggcccagcgctcctcttggccccggctcccaccccggccgagcgccgtgagcccccgagcctcttgggctacctgagcctgcgagctggcgagggccggcccaacggcgagggtgctgagcccggtcccggccgcagcttcggaggcttccgcccgctgtcctctgctctcccggcccgggctcgccggcaccgtgcggaggagcctgaggaagaagaggaggtggtggaggccgaggaggaaacctgggcccggggcaggtcgctgggctctctggcttccctgcacccgcgcccgggtgagggaccggggcactctgcctctgctgctggggcccaggcaagatcgaccgccacgcaggaagagaatgggctgttggttggagggacccggcctgaagggggccggggcgccaccggcaaggattgtcctttctgcggaaaatctttccgctcagcacatcacctcaaagtgcatctgcgagtgcacacaggcgagcggccctacaagtgtccgcactgcgactacgcgggcacccagtccggctcgctcaagtatcacctacagcgccaccaccgggagcagaggagcggggccggccccgggccacccccggagccaccgcctccttcccagcggggttcggccccgcaatctggagccaagccgtctccgcagcctgcgacctgggtggagggcgcctcaagtccccggcctccttctagcggtgctgggccggggtcccgtcggaagcccgccagccctgggaggaccctgcgcaacgggcgaggcggtgaggccgaacccctggacctgtccttgcgggcagggccgggaggcgaggccgggcctgggggtgccctccaccgctgcctcttctgcccgttcgccactggagccccagagctcatggccttgcaccttcaagtgcaccacagccgccgggctaggggccgccggccaccccaggctgacgcgtccccgccctatgcccgagtaccatcaggagagacccctcccagtccttcgcaggaaggggaggagggctccgggctgtccagacccggagaggcagggctgggggggcaagaacggtagtgggccctcaggggcgattagcttagtgagcttaccccgccggagcgggggagcgctagaggtagttgggtagagaagccagcagggggcagcgtgggacccatatcccagccccaggcggaccagaggtggaaggcgcggcgggcgtaggagggtgggctggcggtacccacccagcccaagggagtcacagtgccttagaagtggcagaggtgagggtcaaagaacggggtccctgggctggcagagaaggtttgtgtccctgttgaggagccactctgccagtctttgctggtccataggcgtgagagtttatttttgtacaaggggtgagggtggggggcactgtacccttctagccccatcaggggccctgtagacgtcgctatttttggtacgattcctgtcatccctattgcagagtcgtgtccccaataaacaggtgtcttgaggcacagggccctgtgtctgtctgcctacctatgtcctgaaaaaaaaaaaaaaaaaa

SEQ ID NO: 1264 - DNA, 2204 bp, Homo sapiens
aaacgaacaacgctttcgggtgggcccgggaccatagagggtcgctccgccactttcctagagcgaccgcggcggcgccagagcgcggcgaggccctcacttccggcggcgcgggaggcgcccagcgagccagagtggtggctggtcccgcgcgaaaattctgagctgtacacctctaggaaatgaaacactagttcagaagaagcctgtaaactctcttacaaatacatttggttattcaccatgaggttagcaaagcctaaagcgggtatttctcggagctcaagccaaggaaaggcctatgagaacaagcgcaaaacaggccggcagcggcagaagtggggcatgactattcgatttgactcaagcttcagtagactcagaagaagcttggatgacaaaccctataaatgtactgaatgtgaaaagagtttcagtcagagttcaactctttttcaacaccagaagatccatactggaaagaaatcccataaatgtgctgattgtgggaaaagtttctttcagagttctaatctcattcagcatcgacggatccatacgggggaaaagccctacaaatgtgatgagtgtggagaaagcttcaaacagagctcaaatctcattcagcaccagagaattcatactggagaaaaaccctatcagtgtgatgagtgtggccggtgtttcagccagagctcccaccttattcaacatcagagaacccacactggggagaaaccctaccagtgcagtgaatgtggcaaatgtttcagtcagagctctcatctgaggcagcacatgaaggtgcataaagaagagaagcctcgtaaaacccggggcaaaaatatcagggtgaagactcacttaccctcttggaaagctggtacaggaaggaagtctgtggctggtctccgttaagtatagggctttttgacagctttttgagacctcttaagaaaaaataaaaagtaaaaaatgaaaggaatcttttttagaaatagagatgctttatagtagatcacttaaatactggatcttttgctagtgtgaaaacattgggaatttaatgacattattgagctgaaagaaattacatgagtccagctaccctcatttcttttttatgtgacatggagcacaaagaactgaaaatatgttttgagggagcatgacatccttgacctcatttgaaattacttccattttcaaaaaccatcatgttttgtagatacattttgagaaaaaccatcatgttttgaggatacatttgtgaaagtgcaggcatgccaatgactactcagttttaggactttctgtggaagaaaaaagggagaagaaatcaattccactacttttgaagttctgcaacagatgagattttgtttgtaaagttttgtagtatattaaccattggtttatcactctagattcaacatattaaaatgtattcaagctcacagatttttaatcagtaaggcctatctatattagttgtcttttatttcttctccttgtggacagttgttaatgaaaggagtaaggatttccctttttttgttttgtttgttttgttttttttaaccaaattcttagagatactatagaatccaaatgagaactgaattggacctcaagtcttctattcctactaatagagttctttgtgatggtaactgctgtgtcgtttgttttccacaagttgggatggattcatgtcgatacatccccatgcccttgacctcttctggcattctcctgtgctctgacaaactgagccagccttttagatctacatgaataaacaaactattttaccaagaaaaatctcagcttgcttactgcttaattaaaaacctacaatttacacacctccctgccttcaagactgtgagctttggatagccctgcttaaatgtttgtcaacaacaagagtcgtaatgtgtcagtacattgtagctcctttgaaatttaactctttctgtgttacatgaattgttttaaggagtccggcaaacatgtttcttcacttccatgagaatggtgccaagtgtcagactctaatgagccctcagctcaggttttaatttctattgaatgctaacattcttctgattttttggtatcttttataatcatatcggtttctgctgtattaatgacaattattcatgaaaataaaaaatgaaatattttgtatactacta

SEQ ID NO: 1265 - DNA, 9153 bp, Homo sapiens
actgtctccaagatggcggccgtgtcagtttggggcatctccgcggtccggcccggggccccgggatctcggctgtccttcctcccggcataagatgcacatttttctgctctggagccgggaatgaaatattcttgagttcttacaactttatgacgagacccatgtgtggtgctattgagaaattcattgggaagttggaagacatttcaatcaacaggttgttttggtttctatagtacaattggggtggcattctgttttgtgaaaggaggaaggacttaggccagaaaactcatatgctatggttaactggttcccagcctccgagaatcttgttttccatggtgtaaaacttactcagcatcaggataagggataacgactctatggatatacagaatccttcaccatggtaaaactcgcaaacccgctttatactgagtggattttggaggccatcaaaaaagtgaaaaagcagaaacagcgtccttcagaagaaaggatatgcaatgctgtgtcttcatcccatggcttggatcgtaaaactgttttagaacaattggagttgagtgttaaagatggaacaattttaaaagtctcaaataaaggactcaattcctataaagatcctgataatcctgggcgaatagcacttcctaagcctcggaaccatggaaaattggataataaacaaaatgtggattggaataaactgataaagcgggcagttgagggcttggcagagtctggtggctcaactttgaaaagcattgaacgttttttgaaaggtcagaaggatgtgtctgcattattcggaggcagtgctgcctctggctttcaccagcagttacgattggctatcaaacgtgccattggccacggcagactccttaaagatggacctctttatcggctcaacactaaagcaaccaacgtggatgggaaagagagttgtgagtctctttcctgtttacctccagtgtcccttcttccacatgaaaaggataagccggttgctgaaccaatccccatctgtagtttctgtcttggtacaaaagaacaaaaccgagaaaagaagccagaggaactcatctcctgtgccgactgtggcaacagtggccatccatcctgtttaaagttttcccctgaactaacggttcgagtgaaggccttacggtggcagtgcatcgagtgtaaaacatgcagctcctgtcgagatcaaggcaaaaatgcggataacatgctcttttgtgattcatgtgaccgaggttttcacatggagtgttgtgatccgccactcacccgtatgccaaaaggcatgtggatatgtcaaatatgtcgacctaggaaaaaaggacgaaaacttctacaaaagaaggcagcacagataaaacggcgctatactaatccaataggacgtccaaaaaacaggttaaagaaacaaaacacggtatcaaaaggtcccttcagcaaagttcgaactggccctggaaggggtaggaaacgaaaaatcactctttccagccaatcagcatcatcatcatcagaagaaggatatttagagcggatagatggcttggacttctgcagagatagcaatgtctccttgaagttcaacaagaaaaccaaagggctcattgatggccttaccaaattttttaccccttcccctgatgggcggaaagctcggggggaagtggtggactactctgagcaatatcgaatcagaaagaggggcaacaggaaatcaagcacttcagattggcccacagacaatcaggatggctgggatggcaaacaagaaaatgaggagcgactttttgggagccaggaaatcatgactgagaaagatatggaattatttcgtgatatccaagaacaagcactgcagaaagttggagtgactggtccccctgatccacaagtccgctgtccctctgtcattgagtttgggaagtatgaaattcacacctggtactcctccccatatcctcaagaatactcaaggctgcccaaattgtatctttgtgaattttgtctaaaatatatgaaaagtagaactattctgcagcagcacatgaagaaatgtggttggttccatcctcctgccaatgagatttacagaaagaataatatttctgtctttgaggttgatgggaatgtgagtaccatttattgtcaaaacctgtgtcttttggcaaagttgtttcttgaccacaaaaccctctattacgatgtggagccatttcttttttatgtactaacacagaatgatgtcaagggctgccaccttgttggctacttttctaaggaaaagcactgccaacagaagtacaatgtttcctgtataatgattcttcctcaataccagcgtaagggctatggcaggtttctcatcgatttcagttatttgttatcaaagcgtgaaggccaagcagggtctccagagaaaccgttatctgatctgggtcgtctttcctacatggcatattggaaaagtgtaatattggagtgcctttatcaccaaaatgacaagcagatcagcattaagaagttaagcaagttgactggaatctgccctcaagacatcacttccacactccaccacctacgaatgctggacttccgtagtgaccaatttgtgattatccgccgggaaaaacttatccaggatcacatggcaaagcttcagctgaatttgcgacctgtagatgtagatccagaatgtttgcgctggactccagtcatagtgtccaactctgtggtctcagaggaggaagaagaggaggctgaggaaggagaaaacgaagagccacagtgccaggaaagagaattagagatcagtgtgggaaagtctgtgtctcatgagaacaaagaacaagattcttattcagtagaaagtgaaaagaaaccagaagttatggctccagtcagttctacacgtttgagcaaacaagtccttcctcatgatagtcttcctgcaaatagccagccatctcggaggggccgctgggggaggaagaacagaaaaacccaggaacgttttggtgataaagattctaaactgctcttggaagagacgtcttcagctcctcaggaacaatatggagaatgtggggagaaatcagaagccacccaggaacaatacactgaaagtgaagaacagctggtggcttctgaggagcagccaagccaggacgggaaacctgaccttcccaagagaagactcagtgagggggttgagccctggcgaggacagctcaagaaaagccctgaggctctgaagtgcagattaacagaaggaagtgagaggctgccccgtcgctacagtgagggtgacagggctgtcctcaggggcttcagtgagagcagcgaggaggaggaggagccggaaagccctcggtcaagctcgccaccaattctcacaaagcccacgctgaagcgaaagaaaccatttctccaccgaaggaggagagtccgaaagcgcaaacaccacaatagcagtgtagtcacagaaactatttctgagaccactgaagtgttagatgaaccttttgaagattctgactccgagaggccaatgccaagattagaacccacgtttgagatcgatgaagaagaggaggaagaggatgaaaatgaacttttccctagagaatacttccgtcgtttgtcttcgcaggatgtactcaggtgtcagtcctcttctaagaggaagtctaaagatgaagaagaagatgaagagtcagatgatgctgatgacactcctatcttaaagccagtatctcttttgcgaaaacgtgatgtgaagaattctcctcttgagccagatacatccacacctttgaaaaagaaaaagggatggcccaaaggcaagagccgcaaaccaatccactggaagaaaagacctggtcgaaaaccaggatttaagttgagtcgggaaatcatgccagtttctactcaagcatgcgtcattgagcccatcgtttccattcctaaagctggacgtaaacccaagatccaggagagtgaagaaactgttgagccaaaagaagacatgcccctacccgaggagaggaaggaggaggaggagatgcaagcagaggcagaagaggctgaagagggtgaggaagaggatgcagccagcagtgaagtcccagcagcctctccagcagacagcagcaatagtcctgagaccgaaaccaaggagcctgaggtggaggaggaagaagagaagccccgtgtctcagaggagcagaggcagtcagaggaggagcagcaggaattagaggagccagagccagaggaggaggaagatgcagctgcagagactgcccagaatgacgaccacgacgctgatgatgaggatgatggccacctggagtccacaaagaaaaaggagctagaggaacagcccacgagggaagatgtcaaggaggagcctggtgttcaagagtcttttttagatgctaatatgcagaagagtagggaaaagataaaggataaagaggaaaccgagctggattccgaagaggagcagccttcccatgacacgtccgtggtgtcagagcagatggctgggtctgaggacgaccacgaagaagactcccacactaaggaagagttaatcgaattaaaagaggaggaagagattcctcatagtgagctggatctggaaactgtacaggcagtgcagtctttgactcaagaagaaagcagtgagcatgagggcgcctaccaggactgtgaggaaactcttgcggcgtgtcagaccctgcagagttacacccaggctgacgaggaccctcagatgtccatggttgaagactgtcatgcgtcagaacataatagccctatctcctccgttcagtctcaccccagccagtcagtccgttcggtcagcagtcccaacgtgcctgcccttgagagtggctacacccagatcagcccagaacaaggatccctgtccgcaccctctatgcagaacatggagaccagccccatgatggatgtgccttccgtatcagaccactctcagcaggtggtggacagcggcttcagtgacctgggcagcattgagagcaccactgaaaactatgagaacccaagcagttacgactccacgatgggcggcagcatctgtgggaacagctcttcccagagcagctgctcctacggtgggctgtcgtcctccagcagcctcacccagagcagctgtgtggtcactcagcagatggccagcatgggcagcagctgcagcatgatgcagcagagcagcgtccagcctgctgccaactgcagcatcaagtcacctcagagctgcgtggtggagaggcctcccagtaaccagcagcagcagccgccaccaccgcctccacagcagccacagccgccgccgccacaaccacaaccagcaccacagcctccaccaccccagcagcagccgcaacagcagccgcagcctcagccccagcagcctccacccccaccccctccccagcagcagcccccgctgtcacagtgtagtatgaataacagtttcaccccagctcctatgatcatggagataccagaatctggaagcactgggaacataagtatctatgagaggattccaggggattttggtgccggcagctactctcaaccatcagccaccttcagcctagccaagctgcagcagctgaccaacaccattatggaccctcatgccatgccttatagccattctcctgctgtgacttcctatgcaaccagtgtttctctgtccaatacaggactggctcagctggctccatctcatcccttagctgggactcctcaagcacaagccaccatgacgccacccccaaacttggcatccactaccatgaacctcacatctcctctgcttcagtgcaacatgtctgccaccaacattggcattcctcacacgcagagattgcaagggcaaatgccagtgaaggggcacatttccatccgctccaagtctgcgccactgccctctgcggctgctcaccagcagcagctgtatggccgtagcccatcggcagttgccatgcaggctggccctcgcgcactggctgttcagcgtggcatgaacatgggggttaatctgatgcctactcccgcctataatgtcaattccatgaatatgaacaccttgaatgccatgaacagctatcgaatgacacagcccatgatgaacagcagttaccatagtaaccctgcctacatgaaccagacagcacagtatcctatgcagatgcagatgggaatgatggggagccaggcctatacccagcagcctatgcagcctaaccctcatgggaacatgatgtacacaggcccctcccatcacagctacatgaacgctgctggcgtgcccaagcagtcactcaacggaccttacatgagaagatgagcaagatgaacttgcaatcaaaaacttaaatatatataaataaaggaaccttttatactgacaaaccagagaaaaatggacctttttccagttaaaatattgctgtagatttagaggaatttttctttggtttattttattttttagaaaacctgatcttctctttttttgggttcattttgttctgggttttggttttcttcacaatcttgaacattttacagtagaactcatctaaaaatggatttggggatggggaaacatgcacaaaatcttttcataattaaaaagagccttactttctttacataccacatggacagaatttgtgtaaaagtgaattatctttattttaaaatgtatgtttcccctcactgtttgcagctcccaatgttgtcatttttaaatgttatatacatctcaagggttaaccagaccctttcctccaaacccaacctttcatttcctacttcattccagcaggaggcacttaggggagactcggatggggacatggagaacaacccaagctccttaaacttattattattgttaatattattattattattattaataaagtgaggcaggaaaatgcttctccttttaaaatcccctccactcctcacacacacacacctcttgaaacccttccccaagaatgtttctttatagacggacttcattgaaatctttgttgttcttgaatcaagtgtaatataatttttttcttcttttttaaaatattcccactcagcactcagagacacaaaaatactgtaagtctcaattaacagcagaatctcagagaaaagctgtttgcaatccaaatccagcctttggaggaatagagatggtcaattaacaatcaaaaagaggagattaacctcttgtttttttaccacctggtgaatcagccataacgcacacacacgccacccagcctcttgtttctagtatgtactttgaaatgctaactgagggtcttgatgcttgagcctttgactgataaaactcaaatagcagtccccagtgatttgcctcttaggttctttcttaaattgttggtggatgactgtacattttagtgatttgaaaaataactgacaaaccattgaaacagtttattttatgttggaagagatggcgcagatgtgtgtcagaagggagatcacggtgtgagtttcgtagctatttaagtgatacatacctctagtttttgtatgtcttttgagatcctgagttcatcccctgtgaatcagagtgcacaagcacctctcctgtgagtggctaatgagaagagggacagaccgaccaccagcacagtagggcagatctggacagcagaatgttataacgcaagttcatgtgttgctcccaactccattctcttttctctcgtgcaaccagtttgcccattctcttcctattacttgctccagggataggtaaaaaaaaaaaaaaaaaaaaaaaaaatatatatatatatatatacacacacacacacacacacacacacacatatatatatatatatattccatcattagaagatggaaactattataccacttggtatgtgcagtcaaatatccaaaagggggaagtactgcttagagaaatatctgtaagcattaaattctctcctttatttgtacattttatatagataaatttttaaagtactaattaggcattaacttttttcaaatgcacaggtttgttggtttttttaatacactttaattgactttctcaagcgtgctaggtagaaacgcagaattccacatcttcccgctctcagctctgagcatgtgcaaggctgtgtaggacccagtttctctgtatatactattccagttcccagtcatctatgtagaaagtgcactgtgctgccatcgccctacatcttcagctgtgtcattgcttcctggttggggtggggacggggtgggtcgggagggaggtatattgggaggagggtgggtcaaggcagaaggagaagctgttgaaatgagggccgtgaaatcagtttctgttggtttgcggttgtgtttggttttgtttgtttctttataaaaaattcaatcgggcagctcccttttccacaagcctctttgtgactgtagaactattgtagaaaaaaaaagttcttttctatattataaaagaaattatccaacacagtaatattggtacctgtcattttttcacttctgtttaaaaaaaatgtatttttagcaagataacttgggtaatcttctaaaaaagaaatttaaaaactcactgttagtgactttgatgccttttaaaataagagctttttcatttcattccatctttaaaattttttatctttgttgtagaatattaaaaactattttaagaaagataaattctctttaaagagatctctagcgtgtgtgaatagagctccagatgcctctaaaagccgcatgtacaaaggaagccacgtctatcctgtctgtttatatttgcttttcctgttttgtaacctctttgtactttgttcatggtgacttgtaagctaaggggaaggggtgcctagatgcctttgtatctctccatgtcacgcgctcctgggccagccggcctcccttcctctccttgtatgtaatacctttttttcccctttctagcaagtactttcaaaagaactctgtacattttaacataaaaaataaattatgttgagccattttgga

SEQ ID NO: 1266 - DNA, 2426 bp, Homo sapiens
gcgggagctacggctgcgggagttaccctttattctgtgatattttgagctgttctgcgtctcgcaggcccttctgaatttcctggacctactctcggaaccctcaacgagctagcgatagatttagaggaaaggaagcaccgtcggaaagcaaagggatttctggaagcttgaacttaagagtgataacttagggtacctggcaaaagaaatttctgagcagcaaagcattcaagaagtggcctggctgcctcactgcttcaaacagcctacaattatatatgggagcaaaaaaatgacttaaagttggaatttatatttaaaaggcatgatttcaccttcacttgaactgcttcattcaggactctgcaaattccctgaagtagaaggaaaaatgaccacattcaaagaggcagtgacattcaaggatgtggctgtggtcttcactgaggaggagctggggctgctggaccctgcccagaggaagctgtaccgagatgtgatgctagagaacttcaggaacctgctctcagtagggaatcaaccattccaccaagatactttccacttcttagggaaggaaaagttttggaagatgaagacaacaagccaaagagaagggaattcaggaggcaagatccaaattgagatggagactgttccagaagcaggaccacatgaagagtggtcctgtcagcaaatatgggaacaaattgcaagtgacctaaccaggtctcaaaactccataaggaacagctctcagttcttcaaagaaggtgatgtcccctgccagattgaggcaagactatctataagtcacgtgcaacagaaaccttaccgttgtaatgaatgtaaacagtccttcagtgatgtttctgtctttgatcttcatcaacaatcacactcaggagagaaatctcatacatgtggtgagtgtggaaaaagcttctgttacagcccagcccttcatattcatcagagagtccatatgggagaaaaatgctataagtgtgatgtgtgtggtaaggaatttaatcagagctcacatctgcaaactcatcagagagtccatactggagagaaaccattcaaatgtgggcaatgtgggaaaggcttccatagtagatcagcacttaatgttcattgcaaattgcacacaggagagaaaccttataattgtgaggaatgtgggaaagccttcattcatgattcacagcttcaagaacatcagagaatccatactggggagaagccattcaaatgtgatatatgtggtaagagcttccgtgttagatcaagacttaataggcattccatggttcacacaggagaaaaaccattcagatgtgatacatgtggcaagaactttcgtcagagatcagcacttaatagtcattccatggtccacatagaagagaagccatacaaatgtgagcaatgtggaaaaggcttcatttgtaggcgagatttttgtaagcatcagatggtccacacaggagagaaaccatataattgtaaagaatgtgggaagaccttcagatggtcctcatgtcttttgaaccatcagcaagtccacagtggacaaaaatccttcaaatgtgaagaatgtgggaagggattttatacaaattcacgacgatcttcccatcagagatcccacaatggagaaaagccatataactgtgaggagtgtggtaaggactataaaaggaggttggatcttgagtttcaccagagggtccacacgggtgagagaccctataattgtaaggaatgtggcaagagctttggctgggcctcctgtcttttgaaacatcagagactccacagtggggaaaaacctttcaaatgtgaagagtgtggaaagagatttactcagagttcacaacttcattcccatcagacatgccatactggagaaaagctatacaaatgtgagcagtgtgagaaggggtacaacagtaaatttaatcttgacatgcaccagagggtccacgggggagagcgaccctataattgtaaggaatgtggaaagagctttggctgggcttcatgtcttttgaaacatcagagactccacagtggagaaaagccattgaaatctggagtgtgggaagagatctactcagaattcacagcttcatttacatcagtaagtctatgtgggagaaaagccatataaatgtgagaagtgtgggaagggctttggctgggcctcaactcatctgacccatcaattctccacagcagagaaaaaccattcaaatatgagaactgtgggaagagctttgtacatagatcatatcttttttttttttttttgagacagagtctcactctttcacccaggcctgactgcagtggcgctatctcagctcactgcaagctccgcctcccaggttcacgccattctcctgcctcagcct

SEQ ID NO: 1267 - DNA, 1648 bp, Homo sapiens
gttgctatttcatttaccacagtagtttgagtcatttccacatcttgcgagtccttccgaacgagtctcctttccttggggctcgcaaccacccaatgatcgattcaggagaaaagaagcctgggcggagagcagagcccgacctttctaaaagagctgcaggaagggacttcttggctactgatggcaaagctctacgaggcagtgaccttcaaggatgtggctgtgatcttcactgaggaggagctggggctgctggaccctgcccagaggaagctgtaccgagatgtgatgcttgagaacttcaggaacctgctctcagtgggaggcaagatccaaactgagatggagactgttccagaagcaggaacacatgaagaattttcctgcaagcaaatttgggaacaaattgcaagtgacttaaccaggtctcaagataccaccataagtaactctcagttatttgaacaagatgacaacccctcccagattaaagcaagactatctacagttcacacaagagaaaaacctttccagggtgaaaattgtaaacagttcttcagtgatgtttccttctttgatcttcctcagcagttatattcaggagagaagtctcatacctgtgatgagtgtggaaaaagcttctgttacatctcagcccttcatattcatcagagggtccacatgggagtgaaatgctataagtgtgatgtgtgtggtaaggaatttagtcagagctcacgtctgcaaactcatcaaagagtccacactggagagaaaccattcaaatgtgagcagtgtgggaaaggcttcagatgtagatcagcacttaaagttcattgcaaattacacatgagagagaaaccttataattgtgagaaatgtgggaaggctttcatgcacaatttccagcttcagaaacatcacagaattcatactggggagaagccattcaaatgtgaaatatgtggtaagagcttctgtcttaggtcaagtcttaataggcattgcatggtccacacagcagagaaactgtacaaatctgaaaagtatggaagaggtttcattgataggctagatttgcataagcatcagatgattcatatgggacagaaaccatataattgtaaagaatgtgggaagagcttcaaatggtcctcatatcttttggtccatcaacgagtccacactggagaaaagccatacaaatgtgaggagtgtgggaagggctacattagtaagtcaggtcttgacttccaccatagaacccacacgggagagagatcttataactgtgataactgcgggaagagctttagacatgcttctagtattttgaatcataagaaactccactgccaaagaaagccattgaaatgtgaagactgtggaaagaggcttgtatgccggtcatactgtaaagaccaacaaagagaccacagtggagaaaacccatccaaatgtgaggactgtgggaagcgctacaagaggcgcttgaatctggatataattttatcattatttttaaatgacatataagttatacatatttatggagtgtgaaatttgatacatgtatataatgtgtgctgattaaatcagtttaatttcacctgaaaaaaaaaaaaaaaaaaaaaaaaaaaaaaaa

SEQ ID NO: 1268 - DNA, 2414 bp, Homo sapiens
gcagagaggacacttccggtctcctagtctgaggttcctgctttaatgaccggggtagtttgagccatttctgcgtcttgcaggacattttgaacgaaccccctttgcttgaggctcgcaaccacccgatgatcgatgatcgtctcaggggaaaagaagccttggcgaagagcagaggtttagaggcacaattctgctttccctggaactgtgtcattcaggactctgcaaattccctaaagtaggaggaaaaatgaccatgtccaaggaggcagtgaccttcaaggatgtggcagtggtcttcactgaggaggagctggggctgctggaccttgcccagaggaagctgtatcgagatgtgatgctggagaacttcaggaacctgctgtcagtggggcatcaaccattccaccgagatactttccactttctaagggaggaaaagttttggatgatggatatagcaacccaaagggaagggaattcaggaggcaagatccaacctgagatgaagacttttccagaagcaggaccacatgaagggtggtcctgccagcagatctgggaagaaattgcaagtgatttaaccaggcctcaagactctaccataaagagctctcagttctttgaacagggtgatgcccactcccaggttgaggaaggactatctataatgcacacaggacagaaaccttccaattgtgggaagtgtaaacaatccttcagtgatatgtccatctttgatcttcctcagcaaatacgctcagcagagaagtctcattcctgtgatgagtgtggaaaaagcttctgttacatctcagcgcttcatattcatcagagagtccacctgggagagaaactctttaagtgtgacgtgtgtggtaaggaattcagtcagagtttacatctgcaaactcatcagagagtccatactggagagaaacctttcaaatgtgaacaatgtgggagaggcttcagatgtagatcagcacttacagttcattgcaaattacacatgggagagaaacattataattgtgaggcatgtgggagggccttcattcatgatttccagcttcagaaacatcagagaattcacacaggggagaagccattcaaatgtgagatatgtagtgtgagcttccgtcttaggtcaagtcttaataggcattgtgtggtccacacaggaaagaaaccaaacagcactggggaatatggaaaaggcttcattcgtaggctggatttgtgtaagcatcagacgatccacacaggagagaaaccatataattgtaaagaatgtgggaagagcttcagacggtcctcctatcttttgatccatcagcgagtccacactggagaaaagccatacaaatgtgacaagtgtgggaagagctacattactaagtcaggtcttgacttgcaccatagagcccacacaggagagagaccttataactgtgatgactgtgggaagagctttagacaggcctcaagtattttgaatcataagagactccattgccgaaaaaaaccattcaaatgtgaggattgtggaaagaagcttgtataccggtcataccgtaaagaccaacaaaaaaaccacagtggagaaaatccatccaaatgtgaagactgtgggaagcgctacaagaggcgcttgaatcttgatataattttatcattatttttaaatgacacgtaagtgttgtacatatttatggggtacagtgtgatatttaaatatatgtatatgatgtataatgatcaaatcagtgtaattagcacatttatcacctcaattatctcttttttgtgttgagaaaattaaaaattcattgttccagcagtttgaaaataaattgttgtcgatgatagtcacctttagtgctgcagaacagcagaacttcttcctcttatctacctgtacttttgcatccattagccaacctttggccatcccacctatcccttacccttccctgcctctagagccactgttctcactacttctaagaaatcagctttttaagcttccccatgtgattgaggacagtttgaagttagtgtttcagccatagctcagcataccccagtggtcgtgggactgtcagagcagagaatgctgcagggtttctaacagaagtttgacaattagttattattcaggagacaggtcttagtataagagtttgttcacacactttcaaaacactaatgatgaacatgtcaaaattgatgaccactagaatgtcagccacatgtgtctttgtatttttgctgcatccttacattgcttgagtctggaagattgaggctgcactgacctatggtagtgctactgcactccagccagggcaacagagtgagaccctgtctccaaaaaaaaaaattaaataaatacctttctttgtttc

SEQ ID NO: 1269 - DNA, 2483 bp, Homo sapiens
gaattctgggaagtggagtccaaacattcggtggagtcgcggacacttccgctcggggactgaggttgctgcagtttttccgcgatagtttggggcagttccgcgcgttgcaggcccttctgaatttcctggacctacgcattggatcctcaaagaactgctgaataccactagaaacatacctgtaaccagagacagctgattatagctttctgcagcaaggaagcccacgtaccaggggctgtcttggcacaattctgctttcccaggaactgcatcactcaggactctgcaagtttccagaagtaagagggaaaatgaccacgttcaaggaggcaatgaccttcaaggacgtggctgtggtcttcactgaggaagagctggggctgctggaccttgctcagaggaagctgtatcgagatgtgatgctggagaacttcaggaacctgctctcagtgggacatcaagcattccacagggatactttccacttcctaagggaagaaaagatttggatgatgaagacagcaatccaaagggaagggaattcaggagacaagatccaaactgagatggagactgtttcagaagcaggaacacatcaagagtggtccttccagcaaatctgggaaaaaattgcaagtgatttaaccaggtctcaagacttgatgataaatagctctcagttctccaaagaaggtgatttcccctgccagactgaggcaggactatctgtaattcacacaagacagaaatcttcccagggcaatggatataaaccatccttcagtgatgtctcccactttgattttcatcaacaattacactcaggagagaaatctcatacgtgtgatgagtgtggaaagaacttttgttacatctcagcccttcgtattcatcagagagtccacatgggagagaaatgctataagtgtgacgtgtgtggtaaggaattcagtcagagttcacatctgcaaactcatcagagagtccacactggagagaaaccgttcaaatgtgtggaatgtgggaaaggcttcagtcgtagatcagcacttaatgttcatcataaattacacacaggagagaaaccttataattgtgaggaatgcgggaaggccttcattcacgattcccagcttcaagaacatcagagaatccatacgggggagaagccattcaaatgtgatatatgtggtaagagcttctgtggtagatcaagacttaataggcattccatggttcacacggcagagaaaccattccgatgtgatacgtgtgataagagctttcgtcagagatcagcacttaatagtcatcgcatgatccacacaggagagaaaccatacaaatgtgaggagtgtggaaaaggctttatttgtaggcgagatctttatacgcatcatatggtccacacgggagaaaagccatataattgtaaagagtgtgggaagagcttcagatgggcctcgtgtcttttgaaacatcagcgagtccacagtggagaaaaaccattcaaatgtgaagaatgtgggaaaggattttacacaaattcacaatgctattcccaccagagatcccatagtggagaaaaaccatacaaatgtgtggagtgtgggaagggctacaaaaggaggttggatcttgactttcaccagcgcgtccatacaggagagaaactgtataattgtaaggaatgtgggaagagctttagtcgggccccatgtcttttgaaacatgagagactccacagtggagaaaaaccattccaatgtgaagagtgtgggaagagatttactcaaaattcacatcttcattcccatcagagagttcacactggagaaaagccatacaaatgtgagaagtgtggaaagggctacaatagtaagtttaatcttgatatgcaccagaaggtccacacaggagagagaccatacaattgtaaggaatgtgggaagagttttggctgggcctcgtgtcttttgaaacatcagagactgcacagtggagaaaaaccattcaaatgtgaagagtgtgggaaaagatttactcagaattcacagcttcattctcatcaaagagtgcacactggagaaaagccatacaaatgtgatgagtgtgggaagggcttcagctggtcctcaactcgtctgacccatcagagacgccacagcagagaaacacctctcaaatgtgagcagcatgggaagaacattgtacagaattcattctctaaagtgcaagaaaaagttcacagtgtagaaaagccatacaaatgtgaggactgtgggaagggctacaacaggcgcttgaatcttgatatgcatcagagggtccacatgggagagaaaacatggaagtgtagggagtgtgatatgtgctttagtcaggcctcaagccttcgacttcatcagaatgttcatgttggagaaaaaccttagtgatgtgatggtgcaataaagtcttcactcagtcttcatgaa

SEQ ID NO: 1270 - DNA, 2731 bp, Homo sapiens
actcagtggagtagcgggccacttccgctccgttactgtgaggttgctgcagttttgtccctggtagtttgggtcagttccgcgagacccttctgaatttcctggacctacgcattggatccttaacgaactggtgatcgaattaggggaaaagaaacctcgtcggagagcagaggcaggattctgctttcccttggactgtatcactcaggactctgaatattccctgaaataggaggaaaaatgaccacgttgaaggaggcagtgaccttcaaggacgtggctgtggtcttcactgaggaagagctgaggctgctggaccttgcccagaggaaactgtaccgagaagtgatgctggagaacttcaggaacctgctctcagtggggcatcaatcactccacagagatactttccacttcctaaaggaagaaaagttttggatgatggagacagcaacccaaagagaagggaatttaggaggcaagatccaaatggagatggagactgtttcagaatcaggaacacatgaaggcttgttcagtcatcaaacctgggaacaaatttcaagtgacttaaccaggtttcaagactccatggtaaacagctttcagttctccaaacaagatgatatgccctgccaggttgatgcaggactatctataattcacgtaagacagaaaccttctgagggtaggacgtgtaaaaagtcctttagtgatgtctccgtccttgatcttcatcaacaactacagtcaagagagaagtctcatacatgtgatgaatgtggaaagagtttctgttatagctcagctcttcgtattcatcagagagttcacatgggggagaaactctataattgtgatgtgtgtggtaaggaattcaatcagagctcacatctgcaaattcatcagagaatccacactggagagaaaccattcaaatgtgagcagtgtgggaaaggctttagtcgtagatcaggactttatgttcatcgtaaattacacacaggagtgaaacctcatatttgtgagaaatgtgggaaggccttcattcatgattcccagcttcaggaacatcaaagaatccatactggggagaagccattcaaatgtgatatatgttgtaagagcttccgtagtagagcaaatcttaataggcattccatggttcacatgcgagagaaaccattcagatgtgatacatgtggtaagagctttggtctgaaatcagcacttaatagtcatcgcatggtccacacaggagagaaacggtacaaatgtgaggaatgtggaaaacgcttcatttataggcaagatctttataagcatcagatagaccacacaggggagaagccatataattgtaaagaatgtggaaagagcttcagatgggcctcaggtctttcaagacatgtgcgagtccacagtggagagacaacattcaaatgtgaagaatgtgggaagggattttatacaaattcacaacgttattctcaccagagagcgcacagtggagaaaagccatatagatgtgaggagtgtgggaagggctacaaaaggaggttggatcttgactttcatcagagggtccacagaggagagaaaccctataattgtaaggaatgtgggaagagctttggctgggcctcgtgtcttttgaatcatcagagaatccacagtggagaaaaaccatttaaatgtgaagaatgtgggaaaagatttactcagaattcacaactttatacccatcgtagagtccacagtggagaaaaaccattcaaatgtgaagagtgtgggaaaagatttactcagaattcacaactttattctcatcgcagagtccacactggagtaaagccatacaaatgtgaagagtgtgggaagggcttcaacagtaagtttaatcttgacatgcaccagagggtccacaccggagagagaccttataattgtaaagaatgtgggaagagctttagccgggcctcaagtattttgaatcataagagactccatggtgatgaaaagccattcaaatgtgaagagtgtgggaagagatttactgagaattcacagcttcattcccatcagagggttcacactggggaaaagccatacaaatgtgagaagtgtggaaagagcttcagatgggcctcaactcatctaacccatcagagactccacagtagagaaaaactacttcaatgtgaggactgtgggaagagcattgtgcacagttcatgccttaaagaccaacaaagagaccaaagtggagagaaaacatctaaatgtgaggactgtgggaagcgctacaagaggcgcttgaatcttgatacgcttttgtcattatttttaaatgacacataactgttgtactcatttatggggtacagtgtgatagttaatgcaagtatacaatgtgtaatgatcaaatcagtgtaattaacatacctatcacctcaaacatttatcatttatttatgttgggaacccttaaaattcactgtcctagctatttgaaaataatacgttgttaattactgtcaccctgtagtggtgtaaaacactagaacttattcctcctacctgcctgtatttctgtattcattaaccaacctttggctaccaccctgcctcctcacctctaagaactactattctactctctacttctatgaagttaactttttgagcttccacatatgtgtgagaacatgtggtatgtatctttctg

SEQ ID NO: 1271 - DNA, 2786 bp, Homo sapiens
ggaacctttcaaacttccccgaaatgcacttgtggtcagcagctagcggtcttttgtttggggaaaaaaggagtagcggctaagagcggaaccctgacttctcaaaaagcactgcacagaggaggaggcagcagaaccccatgggctgttttgggagagggactgagtacagtgcaacactactcaaactgtggttcacaaagcagcaacattggcatcacccaggtagaaaggctcattcttgagcctaccgaaggccttctgatttagcatttttgcagataggacccagaaatctgcatttcaacaaaatcccaagttcagcttcttaggactctgcacttccccagaaggaagaattaaaaatgaatatgttcaaggaagcagtgaccttcaaggacgtggctgtggccttcacggaggaggaattggggctgctgggccctgcccagaggaagctgtaccgagatgtgatggtggagaactttaggaacctgctgtcagtggggcatccacccttcaaacaagatgtatcacctatagaaagaaatgagcagctttggataatgacgacagcaacccgaagacagggaaatttaggagagaaaaatcaaagtaagttaattactgttcaagacagagaatcagaagaagagctttcttgttggcaaatctggcaacaaattgcaaatgacttaaccaggtgtcaagactccatgatcaataattctcagtgtcacaaacaaggtgatttcccttaccaggtagggacagaactgtctattcaaatttctgaagatgagaactatatagtaaataaagcagatggtcccaataatactgggaatccagagtttcctatcttgagaacccaggattcttggaggaaaacattcctgactgagtcacagagattgaacagagatcagcaaatttccataaaaaatgaattatgtcaatgtaagaagggtgttgatcccatcggttggatttcacatcatgatggtcatagagtacacaaaagtgaaaaatcttatagacccaatgattatgaaaaagacaacatgaagattttgacatttgatcacaatagcatgattcacacaggacagaaatcgtaccagtgtaatgagtgtaaaaaacccttcagtgatctctccagctttgatcttcatcagcagttacaatcaggagagaagtctcttacatgtgttgagcgtggaaaaggcttctgttacagcccagttcttcctgttcatcagaaagtacatgtgggagaaaaacttaagtgtgatgagtgtggtaaggaattcagtcagggcgctcatctacagacccatcagaaagtccacgtgatagagaaaccatacaaatgtaagcaatgtgggaaaggtttcagtcgtagatcagcacttaatgttcattgcaaggtccacacggcagagaaaccttataattgtgaggagtgtgggagggccttcagtcaggcctctcatcttcaggaccatcagagactccacactggggagaagccattcaaatgtgatgcatgtggtaagagcttcagtcggaattcacatcttcaatcccatcaaagagttcatacaggagagaaaccatacaaatgtgaggagtgtggtaagggcttcatttgtagctcaaatctttacattcatcagagagtccacacaggagaaaaaccctataaatgtgaggaatgtggtaaaggctttagtcggccttcaagtcttcaggcccatcagggagttcacactggagagaagtcatacatatgtactgtatgtgggaaaggctttactctgagttcaaatcttcaagcccatcagagagtccacactggagagaagccatacaaatgcaatgagtgtgggaagagcttcaggaggaattcccattatcaagttcatctagtggtccacacaggagagaaaccctataaatgtgagatatgtgggaagggcttcagtcaaagttcgtatcttcaaatccatcagaaggcccacagtatagagaaaccttttaagtgtgaggagtgtgggcagggtttcaatcagagctcacgacttcagattcaccagctgatccatacgggtgagaaaccatacaaatgtgaagagtgtggcaagggatttagtcgtagagcagatcttaaaattcactgtaggatccacacaggagagaaaccatataattgtgaggagtgtgggaaggtcttcaggcaggcctcaaatcttttggcccatcagagagtccacagtggagaaaaaccattcaaatgtgaagaatgtgggaagagtttcggtcggagtgcacatcttcaagcccatcaaaaagtccacactggagataagccatacaaatgtgatgagtgtgggaagggcttcaagtggagcttgaaccttgacatgcatcagagggtgcacacaggagaaaaaccatataaatgtggggagtgtggtaagtacttcagtcaggcctcaagtcttcaacttcatcagagtgtccacacaggagagaaaccatacaaatgtgatgtgtgtggtaaagtcttcagtcggtcttcacaactacagtctcatcagcgagttcacactggggagaaaccttataaatgtgagatatgtggtaagagcttcagttggcgatcaaatcttacagttcatcacagaatccatgttggtgataaatcctataaaagtaataggggtggtaagaacatcagagaatccacacaggaaaaaaaatctataaaatgattctttgtg

SEQ ID NO: 1272 - DNA, 3688 bp, Homo sapiens
gtagtccaggaggtctcggtaggcagagccacttccgccccaggtacgctaggccgcggccttcgttcctcccagaaaggagatggtgacattcaaggatgttgctgtggtcttcactgaggaggagctggggctgctggactctgtccagaggaagctgtaccgagatgtgatgctggagaacttcaggaacctgctcttagtagcacatcagcccttcaagccagacctaatatcccagctggagagagaagaaaagcttttgatggtggagacagaaaccccaagagatggatgttcaggaaggaagaatcaacaaaagatggagagtattcaggaagtaacagtaagctacttttcccccaaagagctttcctcccgtcagacctggcaacaaagtgcaggtgggttaatcaggtgtcaagatttcctgaaagtttttcaagggaagaattctcagttgcaagaacaaggtaattccctcggccaggtttgggcaggaataccagttcagatttctgaagataagaactatatattcactcatatagggaatggctccaattatataaaaagtcaagggtatccatcttggagggcacatcattcttggaggaaaatgtatctgaaagagtcacataattatcagtgtagatgtcagcaaatttccatgaaaaatcatttctgtaagtgtgacagtgtcagttggctctcacatcacaatgataaactggaagtacacagaaaagaaaactacagctgccatgactgtggagaagatatcatgaaggtatcattacttaatcaggagtcaattcaaacagaggagaagccctatccatgtactgggtatagaaaagccttcagtaatgactccagctctgaggttcatcagcagttccacttggaagggaagccctatacatacagttcatgtggaaagggctgtaattatagttcacttcttcatattcatcaaaatattgagagagaagatgatattgagaattcacatctgaaatcctatcagagagtgcatacagaggagaaaccatgcaaatgtggtgaatatggtgagaacttcaatcactgttcccctcttaacacttatgaacttatccacacaggtgagatgtcctataggcacaacatttatgagaaagccttcagtcatagcttagaccttaatagtatttttagggtccatactagggatgaaccccatgaatatgaggaaaatgagaatgtctttaatcagagttcatgtcttcaagtccatcaaaaaatccacactgaagagaaactatacacagatatagagtatggaaagagtttcatttgtagttcaaatcttgacattcagcatagggttcatatggaagagaattcatataattctgaggagtgtggtaatggcttcagtctggcctcacattttcaggaccttcagatagtccacactaaggaacaaccatataaacgctatgtgtgtagtaacagcttcagccataatttatatcttcaaggtcatccaaaaattcacattggagagaaaccacgtaaggagcatgggaatggcttcaactggagctcaaaacttaaagatcatcagagagtccacactggacagaagccatacaaatgcaatatatgcggcaaaggtttcaatcatagatcagttctgaatgttcatcagagagtccacacaggagagaaaccttataaatgcgaggaatgtgataagggattcagtcggagttcatatcttcaagcccatcagagagtccacactggagaaaaaccttataaatgtgaggaatgtgggaaggggttcagtcgaaattcataccttcaaggccatcagagagttcacactggagaaaaaccatacaagtgtgaggagtgtgggaagggcttcagtcggagttcacaccttcaaggccatcagagagtccacactggagaaaaaccattcaaatgtgaggaatgtgggaaggggttcagttggagctttaatcttcaaattcatcagagggttcacacaggagaaaaaccctataaatgtgaagaatgtggtaaaggcttcagtaaggcctcaacacttttggcccatcagagggtccacacgggagagaagccataccaatgtgatgagtgtggtaagagtttcagtcagagatcataccttcagagtcatcagagtgtccattctggagaaagaccatatatatgtgaggtatgtggaaagggcttcagtcagagagcatatcttcaaggtcatcagagagtccacactagagtgaaaccgtataaatgtgagatgtgtgggaagggctttagtcagagttcgcgccttgaagcacatcggagggttcacacaggagggaaaccatacaaatgtgaggtgtgtacaaagggtttcagtgagagttcacgccttcaagcacaccaaagggttcatgtggaagggagaccctataaatgtgaacagtgtggtaagggtttcagtgggtattcaagtcttcaagcccatcacagagtccacacaggagagaaaccatacaaatgtgaggtatgtggaaagggcttcagtcagagatcaaatcttcaggctcaccagagagtccacacaggagagaaaccatacaaatgtgatgcatgtggtaagggtttccgttggagctcaggtcttctcattcatcaaagagtccatagtagtgataaattctataaaagcgaagactatggtaaggactacccttcatcagagaatctacacagaaatgaagattctgttttgttttgaagtcctcaaatgggagctgaaattttccagtcactagagttctttcagtagaaaaagaatttttaaaaattaaaatgtaatgttgctgcccaacttcaacattcataatggccaggagaccacacaacagagacatttaatgagaggggtttcacgagggattttgttagaactttaacatcagtcattgcacaggagctaaggcttataaaatatgagtatggtcaggaatttaataaaagtacagtgatgagcatgcctaaatccatgttctctagaatgtaagcttggtgaaagaagggactttgttcattgctagtctacaaaactaggacatttcataacgcaatgtaggtgctcagtactttttgctaaataactaaaagtatgtaaaggtaaaaggtttgaaatttttaagcgcattttttaaaacttaaaatgtatttggaggagaaatcctgcaagtaatcttaataaaatcatttcaagtaaatatttgaaatgtagaacaataagcattatgatgatctgaaataacattaatttgattgtaaccctattggggttagttcccaccctttgttccatcttgagcagagatgtgctgcatttcttaacgtttggtctctatacattataccatctgctgaagtttagctttgtgtgtgtgtatatgtacccatgtgtgcacttgaaatatcagtacaaactgataaacaatgtttctggttaatgttgcaaaaatggaacactgtattttacataattgattttctactcctgccctgtgaattaaggcagagttttactgtaatatttgcaagtatccaaaatggttactgatgacaaatactttttaataaatgtcaaaatcacaataaa

SEQ ID NO: 1273 - DNA, 1696 bp, Homo sapiens
gcgtcaccttgattgcttcttaggcagtggtgaggcgtcttaggagacgtgcatctccatgcggttgtactgtcaggccatgggaattaggatcggctctataggaccagtgtgaagggacaacgtgcggcggagggtcgaagcccacggatttccatgagctcggcctggcttccttcttggaattgttcgtttctcggagataattgtataaaagaaggagaaataaccccacatctcttgacactagagctccaggtcccctgaccatgggaagcagtcacgctctggacagtaaaggtggagacaggaacttgtcagagcttggagagtttccggaatgaaaaaggcctggatcttctgcgtctccagcttaggaaagccagagaataaatacagttgctgctgctcgcagaaaacctagcagaagagaccatggagactttgacctcaaggcatgagaaaagagctcttcattctcaagcctcagccatttcccaagatagggaggagaagatcatgtctcaggagccattgagcttcaaggacgtggctgtggtcttcactgaggaggagctagagctgctggactctacccagaggcagctgtaccaagatgtgatgcaggagaatttcaggaacctactctcagtgggtgagaggaatcctctgggagacaagaatggaaaggatacggagtatattcaagatgaagaattaaggttcttttcacacaaagagctctcctcatgcaaaatctgggaagaggtggcaggtgaattacctgggagccaagactgtagagtaaatctgcaaggaaaagacttccagttctcagaagatgctgctccccatcaagggtgggaaggagcatctacgccgtgttttccaattgagaattccctggacagtctacaaggggatgggcttatcggtctagaaaatcaacagtttccagcctggagagctataagaccaatccccattcaaggatcttgggcaaaagcgtttgtgaaccagttaggggatgttcaagaaagatgtaaaaatctcgacacagaagacacagtatataaatgtaactgggatgatgacagcttttgctggatatcttgtcatgttgatcacagattccctgaaatagacaagccgtgtggttgcaataaatgcagaaaagactgcattaaaaactctgtacttcatcgcattaaccctggagagaatggcttgaaaagtaacgaatacagaaatggcttcagggacgatgcagaccttcccccgcatccaagagtacctttgaaagagaaactctgtcaatatgatgagtttagtgagggcttgaggcacagtgcccatcttaacagacatcaaagagttcccacaggagagaaatctgttaagagtcttgagcgtggtcggggcgtcagacagaacacgcacatacgtaaccaccccagagcccctgtgggagacatgccctatagatgtgatgtctgtggaaaggggttcaggtataaatcggttcttcttattcatcaaggggtgcacacaggaaggagaccctataaatgtgaggagtgtgggaaggcatttggtcgaagttcaaacctgcttgtccatcagagggtccacactggagagaaaccatataaatgcagcgagtgtgggaagggcttcagttacagctcagtgcttc

SEQ ID NO: 1274 - DNA, 2293 bp, Homo sapiens
gagactgacaatgatttgacaaaggaaatgtatgaaggaaaagagaatgtatcatttgaacttcaaagagacttttcccaggaaacagacttttcagaagcctctcttctagagaaacaacaggaagtccactcagcaggaaatataaagaaggagaagagcaacaccattgatggaacagtgaaagatgagacaagccccgtggaggagtgtttttttagtcaaagttcaaactcatatcagtgtcataccatcactggagagcagccctctgggtgtacaggattggggaaatccatcagctttgatacaaaactcgtgaagcatgaaataattaattctgaggaaagacctttcaaatgtgaagaattagtagagccctttaggtgtgactctcaacttattcaacatcaagagaacaacactgaggaaaagccttatcagtgttcggagtgtggcaaagctttcagcattaatgagaaattaatttggcatcagagacttcacagtggggagaaacccttcaaatgtgtggagtgtgggaaaagcttcagctacagttcccattatatcacacatcagacaatccacagtggggagaagccctatcagtgtaagatgtgtgggaaggccttcagtgttaatggaagcctaagtaggcatcagagaatccatacgggagagaagccctatcagtgcaaggaatgtggaaatggcttcagctgtagttctgcatatattacacatcagagagtccacactggagagaaaccttacgagtgtaatgactgtgggaaagcgttcaatgttaatgcaaaattaattcaacatcagagaatccatactggagagaaaccttatgaatgtaatgaatgtggaaaaggcttcaggtgcagctcccagcttaggcagcatcagagcatccacacaggagaaaagccctatcagtgtaaagagtgtggaaaaggcttcaataataatacaaaactcattcagcatcagagaatccacacaggtgagaaaccctatgaatgcactgaatgtggaaaagccttcagtgtcaaagggaagttaatccaacaccagagaattcacacaggcgagaaaccctatgagtgtaatgaatgcgggaaagccttcagatgtaactcccaatttcggcagcatctgagaattcacactggggagaagccctatgagtgtaatgagtgtggaaaggccttcagcgttaatgggaaactaatgcggcatcagagaattcacactggggagaaaccttttgaatgtaatgagtgtgggagatgctttacttctaaaagaaacctacttgatcatcaccgaatccatactggagaaaagccctatcaatgtaaggaatgtgggaaagccttcagtatcaatgccaaactaactaggcatcagaggatacatactggggagaaacctttcaaatgtatggaatgtgagaaagcattcagctgtagttctaactatattgtgcaccagagaatccatacaggagagaaaccctttcagtgtaaggagtgtggaaaagccttccatgttaatgcccatttaattcggcatcagagaagccacactggggagaaacccttcagatgtgtggaatgtggcaaaggcttcagctttagttctgactacattatacatcagacagtccacacttggaagaaaccctatatgtgtagtgtgtgtgggaaagcattcaggtttagcttccagctcagtcagcatcagagtgtccatagtgaaggaaaatcctaataatgagaaagatatagaaaactcttaaggttaatgccaaaatggatcaagtatcatcagattcatccattgaaaaacctccaagagggcatgaatatggcagagtcttcatatggaaacagtttttattctattcagtttaaatcaggaaaggatgaccagttaaagagaaacatccaaaaatagctttgttttgtaccaacaggaattagaaaatataatgaaaagatttcgttcccagcagcatcaagaaaagtagattttctagaaataaacagttatggaggacttgtatggagaaatttaagtcttcactgagggccactttacaaaggaaatttgaataaatggagagagagagaagccttgttgttggataggaaaacccgtactaaagatactctacctacattaatttatttgtttaatttttgacaacaagcatgtattacttttgaaaagatgaaaaataaagatttatttaaaaaaggaaaaaaaaaaaaaaaaa

SEQ ID NO: 1275 - DNA, 4132 bp, Homo sapiens
agacgctctgtggagacgcgagcacttccggtgtgtgagcctgcggttgctacataaccgcgtagtttgagccatttctgcgtctggcgggtccttctgaacttgtcaccttcgcttggggtcgcaacgacccgatgatcgatgatccaagcaagggaaaagaagccttggcggagagcggaggcacaattccaccttcctttgtgctccattactcaagacactgaagactccaaaaagtaggaggaaaaatgaccacattcaaggaggcagtgaccttcaaggatgtggctgtgttcttcactgaggaggaactggggctactggaccctgcccagaggaagctgtaccaagacgtgatgcttgagaacttcacgaacctgctgtcagtggggcatcaaccattccaccctttccacttcctaagggaagaaaagttttggatgatggagacagcaacccaaagagaaggaaattcaggcggcaagactattgcggaagcaggaccacatgaagactgcccttgccagcaaatctgggaacaaactgcaagtgacttaacccagtctcaagactccatcataaataattctcacttctttgaacaaggtgatgtcccctcccaggttgaggcaggactatctataattcatacaggacagaaaccttcacagaatgggaagtgtaaacagtccttcagtgatgttgccatctttgatcctcctcagcagttccactcaggagagaagtctcatacatgcaatgagtgtggaaaaagcttctgttacatctcagctcttcgtattcaccagagagttcacttgagagagaaactctctaagtgtgacatgcgtggtaaggaattcagtcagagctcatgtctgcaaactcgtgagagagtccacactggagagaaaccattcaaatgtgagcaatgtgggaaaggcttcagatgtagagcgatacttcaagttcactgcaaattacacacaggagagaaaccttatatttgtgagaaatgtgggagggccttcattcacgatttccagcttcagaaacatcagataattcatactggggagaagccgttcaaatgtgaaatatgtggtaagagcttctgccttaggtcaagtcttaataggcattgcatggtccacacagcagagaaactgtacaaatctgaggagtgtggaaaaggcttcactgatagcctagatttgcataagcatcagataattcacacaggacagaaaccgtacaattgtaaagaatgtgggaagagcttcagatggtcctcatatcttttgatccatcagcgaatccacagtggagaaaaaccatacagatgtgaggagtgtgggaagggctacattagtaagtcaggtcttaacttgcaccagagggtccatactggagagagaccttataattgtaaggaatgtgggaagagctttagccgggcttcaagtattttgaatcataagaaactccactgccggaaaaaacccttcaaatgtgaggattgtggaaagaggcttgtacaccggtctttctgtaaagaccaacaaggagaccacaatggagaaaactcatccaaatgtgaggactgtgggaagcgctacaagaggcgcttgaatctggatataattttatcattatttttaaatgatatgtaagttgtacatatatatgggatatggtatgaaattttaatatgtgtatataatacgtaatgatcaaattgatgtaattagtgtattaccttaaacaattaacatttctttgttttgggaaaattcaaaatccattgttctagcgatttgaaaagaaacaataaattattgttgattatagtcacctttggtgctttagaacactagaatgtatttctcctatctagcagtacttatgtatcttgttacccaatctttggctatctcacctaacccctacacttccctgcttctagaaccactgttttactcactaattctatgaaatcaacttttttagcttccatatgtgtgtgaggacagttagtatttatcttaccttgcttagcttatattgtttaacatgtcctccaaagctcatctatgttgccacaaatgacacaattttgttttctttttatgcccaaagagtattctattgtgtatatatgccaccttttcttcatttatctattgatggacacataggtgggttccatatcttaactattgtgaagaatagtgctccaatgaacatggtagtgtagatatctgatccacatactgatttcctttgctttggatatactcaatagtgggattgctagatcactcgaatcttatgcctcagaggcttgacacaagagcaaaactatggaagtgtggctagggtgatatggcttcataccacctcaggcctcaagtcctcaactgcaccagagtgtccacgttggacagaatccttagtaatgaggtgtgtgataaagtctctgctcagttgtctataatctcatttgagagttcacaaaggggcaaaacattaaaaagaggcatatggtaagcacttcagtgtgtgtttatatcataatttatcacagtccatactgataatatatttcatccaggcttgtaggacagaaaacatttgtttaagttaaattcagtgtttcaccatagctcagcattctcccatcatcctaggaccatcgtagtagagaactcttgtaaattgtgcagtagggttgcaaacagaacttacgcttgtcattcaggagacaggccttagaataagagtttgttcacacatttacaaaaccctaatgatgaacatgtcaaaagtggtgaccactagaatgtcaactacaggtaccttgttttctgcatcctcaggaccttaacactgattagcacttacatgtttagtatgtgttaaatgactcaaaaggagaaaatatgatattttaaaattgcatctaggagagaaaatctacaaaaaataattcagggacacgagttaaaatgcagaatacactcagttctgcaatccaaagcattattttgggtaatcttaccctgttgcacttggctgctggcttcccctcatcctctgttctgaagtttactactagtggctttgtctaatgctccattggttgcatacaatataaattcaacaatcatttgtaactcttctcacactacaggctgaaaatggtttgttaacttgtcaataacagtccactgcatatatcacaattacatttttttcaacagtgttaaggcaaaatttatagtaatactttttacgtggcagatgtagttacgttggaaaaaacttccttagttctgaattctcatgattgcttctgtatttccatgcaggccttgatataatggccttctaattgtggtagcatttattttatcaaacaactcaggtagaagctatgccaatttgacaatttttggaaacctaacctaatattctcttcctatctctatgaaataccaagagaaacctatcggagtttggtaatttcatgaaatgtatccatgattggggtaggagtgacatttacatgctcttctttattgttggcagtaaaaataagtcttttgtaagcagtgtatatcagaatgtataaggtacaagtgttttacctggaaatgatgggataggaaattatgattatgatgttaaaactgtgaaaagtagaaaaccacatggatgatatcaccccattttaaaatggaataagtattcaacaagaatttgtgtgaaatgcatttattcctataacataagaccaataaaatgagggaaccagacatacagtaaaaggagaaaaacataatgtgagctttgtgaaatctgactgtaaccttcataacataatcaaatatctttgtgtgtttctgggactttttaatgtgtatatacgtaatttgtgaacaactattctttcctctggcaatgaatatttgctggtatttttccattttataattttatgcattttttctcagtgaacatcagttttatcaaagcagtaaatttagtgcaataaatttgcaaacttattaacgttaatcacttacctaccaggactcagaatctcagaataaaattgctctatatt

SEQ ID NO: 1276 - DNA, 2125 bp, Homo sapiens
cgacgacaaggatggggcccatctcttcggagcctaaggatccagcccaggtccagccctgcgcagccgcccaccaagctgccagaagacgagccggacgcccaaggctacgagaggacgattgcagaattgtacaggctagtggttggggaatattttttcgtggaagggaccgtcttccttagctgtggccctctcatcaggtctgggaagaggtaattggaaaatagaactcatggagaagtgttaccacaggccatggacaaggccagaatttccctgacatctgtccgccagcaccgcccttcaggtacaattccacaagagaccccccaaacttgatgaagtcacccgcttacaagggctcactctccacctgcgcaaggactgcaattcccaggggcctccagggcacccggccgctccagtccagtcgtgcaggcggcgcgctctttctcgctccgctcaagtccaggaaccggttcccgggctcccagcctctcggcagcgcccacgcgcctgggccaaagtccgcgaacggaagccggcggcgaggaggattctgggagttggaggccgaggctgcgacctgcgcaggcgcaaacctgcccctggggtgagggctgtaagtggcgcgattcgcggcagcgccccgatggaacctcctggtcctgtgagggggcccttgcaagattccagctggtatgagccttctgcagagctagtgcagactaggatggctgtatcactaacagcagctgaaactctggcccttcagggtacacagggacaagagaagatgatgatgatgggaccaaaggaagaggaacagtcttgtgagtatgagaccaggctacctgggaaccactctaccagtcaagagatcttccgccaacgcttcaggcatctccgctaccaggagactcctggtccccgggaggccttgagccaactacgagtactctgctgtgagtggctgaggccagagaaacacacgaaggagcagatcctggagttcctggtgctggaacaattcttgaccatcctgcctgaggagctccaatcctgggtgcggggacatcaccctaagagtggagaggaggctgtgactgtgctggaggatttagagaaaggacttgaaccagagccgcaggtcccaggccctgcacatggacctgcacaggaagagccatgggagaagaaggaatctctgggagcagcccaggaagcactgagcatccagctccagcctaaggagacccagcctttcccaaagagtgaacaggtatatttacattttctgtcagttgttacagaagatggcccagagcccaaggacaaaggatcattgccacaaccacccattactgaagtggaatcacaggtgttctcagaaaaacttgctactgacacctctacatttgaagctacctctgagggtaccttagaactgcagcagagaaatcccaaagcggagagactgaggtggtcccctgcccaggaggaaagtttcaggcagatggttgtcatccataaggaaattcccacagggaagaaagaccatgaatgtagtgaatgtggtaaaaccttcatttataactcacatcttgttgtccaccagagagttcattctggagagaaaccctataagtgtagtgactgtgggaaaactttcaaacagagctcaaacctcggtcagcatcagagaattcatacaggagagaaacccttcgaatgtaatgaatgtgggaaggccttcagatggggtgctcatcttgttcagcatcagaggattcactcaggagagaagccctatgagtgtaatgagtgtgggaaggcctttagtcaaagctcatatctaagtcagcatcggagaattcacagtggagagaaaccttttatatgtaaagaatgtgggaaagcttatggatggtgctcagagctcattagacatcggagagttcatgccagaaaagagccttcccattgaattgaaggggagaacgtctccagacagaattctacatcggtctaatctactttaggactggatcccataaaagttataagttccttaaaaaaaaaaaaaaaaaaaaaaaaaaaaaaaaaaaaaaaaaaaaaaaaa

SEQ ID NO: 1277 - DNA, 2782 bp, Homo sapiens
ctatcccctctgggaggtgagtcagcgcggaacctctgcatctacggcgagctttcctggcctgggcgttggactcgcagttctgccttcccaggaccctgcccttccccagaaggagcaggagaaaatgaccaagtttcaggagatggtgacattcaaggatgtggctgtggtcttcaccagggaggagctggggttgctggaccttgcccagagaaagctgtaccaagatgtgatgctggagaacttcaggaacctgctgtcagtgggctatcaacccttcaaactagatgtgatattacagttgggaaaagaagacaagcttcggatgatggagacagaaatccaaggagatgggtgttcaggacacaagaatcaaaatgagatagatacccttcaagaagtaagattaagattcctttcatatgaagaccttatatgctggcaaatatgggaacaatttacaagtaaattaaccagtaatcaagacctaataataaatcttcaaggcaagaggtccaagttgctaaaacaaggtgattccccctgtcaggtgtggacaggagaatctagtcaggtctctgaagatgagaactatgtaataaagctacaaggggagagttcaaatagcataaaaaatcaagagcttccattgaggaccacctgggatttctggaggaaaatgtatctgagagaaccacagaattatcagagtaggtgtcagcaaattgatgtaaaaaataagctctgtaaatgtgatcattgtgttaggcaaagaattgctcatcaacatgatgatcatggagtacacaaaagagagaaagcttttagccacaataattgtggaaaagactgtgtgaaggaatcatcccagcatagcataatccaatcaggagagcaaacctctgatgaaaatggaaaaggcttaagtgttggctctaatcttgaacttcaccagcaactacacttaagagacaagcctcatgtaaatgttgagtacgggaagggcataggttacagctcagggcttcccaggcatcagtgtttccatataggagagaaatgctataggaatggtgacagtggtgagggcttcagtcagggctcacatctgcaacctcatcagagagtcagcacaggagagaacctctacagatgtcaggtatatgcccggagctccaaccagaactcctgtcttccctctcatgagcttactcacccaggagagaagttgtgtacatgtggcaggtgtgggaagggcttccatcatagcttagattttgacattcactgtgtagacagtgctggagagagagcctgtaaatgtgatgtatatgataaaggcttcagtcagacatcacaacttcaagcccatcagagaggtcactctagagacaagacatacaaatgggaagtaagtgacaggatatttaataggaattctggtcttcaccagagagttcacactggagagaaaccatataaatgtgaggtatgtgataagggcttcagtaaggcctcaaatcttcaagcccatcagagaatccacactggagagaaaccctacaaatgtgatgtgtgtgataagaacttcagccgtaattcccaccttcaggcccatcagagagtccatacaggagagaaaccctacaaatgtgacacatgtgggaaggacttcagtcagatctctcatcttcaggcccatcagagagttcacacaggagagaagccatacaaatgtgagacatgtgggaagggctttagtcagagttcgcatctccaagaccatcagcaagtccatactggagagaatccctacaaatgtgatgtgtgtgggaaaggcttcagttggagttcacatcttcaagcccatcagagagtccacacaggagagaaaccatacaaatgtgaagaatgtaggaaaggcttcatctggaactcatatcttcatgttcatcagaggatccacacgggagagaaaccctataaatgtggcatgtgtggtaagagcttcagtcagacttcacatcttcaagcccatcagagagtccatactggagagaaaccatacaaatgttttgtgtgtggtaagggctttagtaagagttcgttgtcttcagattcatcagagagtccatgatggtgatgaatctattaatcatgatgagtgtgataggggtgctcttcaagacttagacttcccattttcctcagaaaatccacacagcacagaatatttataaaatgtcatgttttaagaattcatgagctgagtttttatagttatctgaattccattgaagaaaacctatttttgtatgaatatgaccagtttcaagcagagcccaaaatgtcacagttgtcaagagaacacacaacagagaaaccctataaagaatgatacaatatgtttcaatcagaaccttcacatccaataagcaatatgcaggagtgaagccttcaaaatgataagtaaggtcagaatttagcaaaagtataatgagggacatgacaaaatctgtgtccactagaatctaagctccatgcaggaacattgtttactgctgcatgatcgtgaccttgaacaagtacctaagaaatagtggcttccctggaattgtttaacttgataggaaaaatctatcatatataggacatatatttgaatattttagtgagctcagccccaattcgtcattataattgtactgggaaaaggattcttgcaagaagccttaaaatgaattcaaggaaatgacatttaattaaaacacataaaacc

SEQ ID NO: 1278 - DNA, 2079 bp, Homo sapiens
ggagggactgaccttcaaggatgtggctgtggtcttcactgaggaggagctggggctgctggaccctgtccagaggaatctgtaccaagatgtgatgctggagaacttcaggaacctgctgtcagtggggcatcaccccttcaaacatgatgtattccttttagaaaaggaaaaaaagcttgatataatgaagacagcaactcaaagaaaagggaaatcagcagacaagatccaaagtgaggtggagactgttccagaagcaggacgacatgaagagctttactgggggcaaatctggaaacagattgcaagtgatttaatcaagtatgaagactctatgataagtatttctcggttccccagacaaggtgatttgtcctgccaggttagggcaggactatatacaactcacacaggacagaaattttaccaatgtgatgagtacaaaaaatccttcactgatgtcttcaactttgatcttcatcaacagttacactcaggagagaagtctcatacatgtgatgagtgtggaaaaagcttctgttacatctcagcccttcatattcatcaaagagtccacatgggagagaaatgctataagtgtgacgtgtgtggtaaggaatttagtcagagctcacatcttcaaactcatcagagagtccacactgtagagaaaccattcaaatgtgtggaatgtgggaaaggcttcagtcgtagatcaacacttactgtacattgcaaattacactcaggagagaaaccttacaattgtgaggaatgtggaagggccttcatacatgcttcccatcttcaggaacatcagagaattcatactggggagaaaccattcaaatgtgatacatgtggtaagaacttccgtcgtagatcagcacttaataatcattgcatggtccacacaggagagaaaccatacaaatgtgaggactgtggtaagtgtttcacttgtagctcaaaccttcgtatccatcaaagggtccacacaggagagaaaccttacaagtgtgaagaatgtggtaagtgctttattcagccttcacaatttcaggcccatcggagaatccacactggagagaaaccatacgtatgtaaagtgtgtggtaagggtttcatttacagttcaagttttcaggcccatcagggagtccacactggagagaagccatacaaatgcaatgagtgtgggaagagcttcagaatgaaaattcattatcaagtgcatctggtagtccacacaggggaaaaaccctataaatgtgaagtatgtggtaaagccttccgtcagagttcatatcttaaaatccatctgaaagcacatagtgtacagaaaccttttaagtgtgaagagtgtgggcagggcttcaatcagagctcacgacttcagattcaccagctgatccataccggtgagaaaccatacaaatgtgaagagtgcggaaagggatttaatcgtagagcagatcttaaaattcattgtaggatccacacaggggagaaaccatataattgtgaggagtgtgggaaggtcttcagtcaggcctcgcatcttctaacccatcagagagttcacagtggggaaaaaccatttaaatgtgaagagtgtgggaagagcttcagtcggagtgcacaccttcaagcccatcaaaaagtccacactggagaaaagccatacaaatgtggggagtgtggaaagggcttcaagtggagcttgaaccttgacatgcatcagagggtgcacacaggagaaaaaccctatacatgtggggcgtgtgggaagcacttcagtcaggcctcaagtctccaacttcatcagagtgtccacacaggagagaaaccatacaaatgtgatgtatgtggtaaagtcttcagtcggtcttcacaattacagtatcataggcgagttcacactggggaaaaaccttacaaatgtgagatatgtggtaagaggttcagctggcgatcaaatcttgtaagtcatcacaaaattcatgctgctggtacattttatgaaaatgatgagaatagtaagaacatcagagagttgtcagagggaggaagttc

SEQ ID NO: 1279 - DNA, 3190 bp, Homo sapiens
ggaggcacttccgctccaggaaggcgaggtcggatctgagatatctcccagggaggttcacttccccggaactctgccttttcccagaaggaggaggggaaaaatgaccaagttccaggaggcagtgacattcaaggatgtggctgtggccttcactgaggaggagctggggctgctggactctgcccagaggaagctgtaccgagatgtgatgctggagaactttaggaacctggtttcagtgggacatcagtccttcaaaccagatatgatatcccagttggagagggaagaaaagctttggatgaaggagcttcaaacccaaagaggtaagcattcaggagacaggaatcaaaatgagatggcaactcttcacaaagcaggattaaggtgcttttcactgggagagctttcatgctggcaaatcaagagacacattgcgagcaaattagccagaagtcaagactccatgataaatattgaaggaaagagctctcagttccccaagcaccatgattccccctgtcaagtgggagcaggagaatctattcaagcttctgtggatgacaactgtctagtgaatcacataggggatcattccagtatcattgaaaatcaagaatttccaactgggaaagttccgaattcttggagtaaaatatatctgaatgagacacagaattatcagagaagttgtaagcagactcagatgaaaaacaaactatgtatatttgctccatatgttgacattttcagttgtatttcacaccaccatgatgataatatagtgcacaaaagagataaagttcatagcaatagtgattgtggtaaagataccctaaaggtatcacctcttacccagcgtagtattcacacaggacagaaaacctaccagggtaatgaatgtgaagaagccttcaatgatagctccagtcttgaacttcataaacaggtacacttgggaaagaagtctccagcgtgtagtacacatgagaaggacaccagttatagctcaggtattcctgttcaacaaagtgttcgtactgggaaaaaacgctattggtgtcatgaatgtggtaaaggtttcagtcagagctcaaatctgcaaactcatcagagagtccacacaggggagaaaccctatacatgccacgagtgtggtaagagctttaatcagagctcacatctttatgctcatttgcctattcacacaggagagaagccctatagatgtgacagttgtgggaagggcttcagtcgtagcacagatcttaacattcattgcagagttcacactggagagaaaccttataaatgtgaggtgtgtgggaagggcttcactcagagatcacatcttcaggcccatgaaagaattcacactggagagaaaccatataaatgtggggattgtggtaaacgctttagttgtagctcaaatcttcatacccatcagagagtccacactgaagaaaaaccatacaaatgtgatgagtgtggtaagtgctttagtttgagctttaatcttcatagtcatcaacgagtccacacaggagaaaaaccatataaatgtgaagagtgtggtaagggttttagttcagcctcaagtttccagagccatcagagggtccatacaggagagaaaccatttcgatgcaacgtgtgtgggaaaggcttcagtcagagttcatactttcaagcacatcagagagtccacactggagaaaaaccatacaaatgtgaagtgtgtgggaagcgcttcaattggagcttgaatcttcacaatcatcagagagtccacaccggagagaaaccctacaaatgtgaagagtgtggtaagggtttcagtcaggcttcaaatcttcaagcccatcagagcgtccacactggggaaaaaccattcaagtgtgatgcatgtcagaagcgattcagtcaggcctcacaccttcaagcccatcagagagtccacaccggagagaaaccatataaatgtgacacttgtggtaaggccttcagccagaggtcaaatcttcaagtccatcagataattcacactggagagaaaccatttaaatgtgaggaatgtgggaaagaattcagttggagtgctggtctcagtgcccatcagagggtccacacaggagagaaaccctatacgtgtcagcagtgtgggaagggcttcagtcaggcctcacattttcacacacaccagagagtccacactggagagaggccttacatatgtgatgtctgttgtaagggcttcagtcagaggtcacatctcatctaccatcagagagtccacactggagggaatctgtagaaatgagaggtgtggttcagccttcagttagagctcacatctttgtctccgttgggaagtccatgctgatgattgtgaaaagttcctttaaaactagaagcttcaaagaatcttgacaggaaagaagtctctcaaatgctgtgttttagacttggttaggacatgaattctttacaaacgtcatatttcacagatgcgagaaaactttgttctgtaaatatgatcagtgtttatatcagagtaccaggtgtcccggttctcaagatgtaacacagcagaaaagtcttgtcggagtctgcacaggagagaggccttcctttaacaaaagtatgattgacagaaaaaatggatgtcaactaaaatgtaacctctatgtaaggaggtgtttttcaccactctatctctaccatgtagaattgtgcttggctcataatagggcccagcaattactgaagaaagtgaagaaaatacctataattaggacaaatacttgaaaattctagtctgttttctactctaaatttatattaatttatattcaaaaggaatcctgcaagtagccttaataacgttagtttcagtaagtactgaaaagtatataatactgccatccatactaacacaaatttggaaaaaagacatgaatggctcccatccttcagccttagttctttgtacagtgtatcatcagttgtgtacagtatgatttttagtgtcagtttatagactgaacaatactgtttttatctaatgtgaccctgcaatttacatgattagaatttttggacactaagctgtactgtaactctgaaagtgttaaaagtagttactgatgacaaaaagtttcttagtaaacttgaattgttaata

SEQ ID NO: 1280 - DNA, 8140 bp, Homo sapiens
gcctggaaactacaaaggattgtgttaattttgtgtttaggaagaaagaggtaatgggtaggaatcaatgtaaacttattcataggccacaccaaaccaggaattcttgtcgtgattgcacttggtagagttaacacacgtgcacattacggaaacgttggtgaccaacaggcgtttcagcgagctttcgcacacctcatgggcctttgtgggctgctggagagatgttggctgcaccatgacccagatggagttttaacattgaatgcggagaacactaattatgcctatcaagttccaaacttccataaatgtgaaatctgtctactatcttttccaaaagaatcccagtttcaacgccacatgagggatcacgagcgaaatgacaagccacatcgatgtgaccagtgcccccaaacatttaatgttgaattcaacctgacacttcataaatgcacccacagcggggaagatcctacctgccctgtgtgtaacaagaaattctccagagtggctagtctcaaagcgcatattatgctacatgaaaaggaagagaatctcatctgttctgagtgtggggatgagtttactctgcagagtcagctggccgtgcacatggaggagcaccgccaggagctggctggaacccggcagcatgcctgcaaggcctgcaagaaagagttcgagacctcctcggagctgaaggaacacatgaagactcattacaaaattagggtatcaagtacaaggtcttataaccggaatatcgacagaagtggattcacgtattcgtgtccgcactgtggaaagacgtttcaaaagccaagccagttaacgcgacacattaggatacacacaggtgaaaggccgttcaaatgtagtgaatgtggaaaggcttttaaccagaagggggcactgcagacccacatgatcaagcacacaggtgaaaaaccccatgcctgtgccttctgtcctgccgccttctctcagaaagggaatcttcagtcgcacgtgcagcgagtccactcagaggtcaagaatggtcctacctataactgtacagaatgtagttgtgtatttaaaagtttaggcagcttaaacacgcatatcagcaagatgcatatgggtgggccacagaattcaacaagttctacagagactgctcatgttttaacggccacactttttcagacgttacctcttcaacagacggaagcccaagccacgtcggcctcaagccagccgagctcccaggcggtgagcgacgtcatccagcagctcctggagctctcagagccggcgccggtggagtcggggcagtccccgcagcctgggcagcagctgagcatcacagtgggcatcaaccaggacattttacagcaagccttagaaaacagtgggctgtcttcaattccagctgcagcacatcctaatgactcctgccatgccaagacctctgcaccacacgctcaaaacccagatgtttccagcgtttcaaatgagcagacggaccccacagacgcagagcaagaaaaagaacaggaaagcccggagaaactggataaaaaagaaaaaaaaatgataaagaagaagtcaccgtttctacctggctccatccgcgaggagaacggcgtgcgctggcatgtgtgtccctactgcgccaaggagttccgcaagcccagcgacctggtccgccacatccgcatccacacccacgagaagcccttcaagtgcccgcagtgcttccgcgccttcgccgtgaagagcacgctgacagcgcacatcaagacgcacaccggcatcaaggcgttcaagtgccagtactgcatgaagagcttctccacctctggcagcctcaaggtgcacattcgcctgcacacaggagttagaccttttgcttgtcctcactgtgacaaaaaatttcgaacctcaggccataggaagactcacattgcttcccactttaaacatacggaattaaggaaaatgaggcaccagcgtaaacctgcaaaggtccgtgttggcaagacgaatattccagtccctgatattcctttgcaggaaccaatcctcataactgacttaggtctcatccagcccattccaaaaaaccagtttttccaaagctatttcaataataattttgtcaatgaagcagatagaccatacaagtgtttttactgtcatcgtgcatataaaaaatcttgccaccttaaacaacacatcagatcccatacaggtgaaaaaccttttaaatgttctcagtgtggaagaggctttgtttctgcaggcgtgctcaaagcacacatcagaacacacacaggactgaaatctttcaagtgtctgatatgtaatggggctttcactactggtggcagcttacggcgacacatgggtatccacaacgaccttcgtccctatatgtgtccctattgccaaaaaacatttaagacttcactaaattgcaaaaagcacatgaaaacccacagatatgagcttgcccagcagctccaacagcatcagcaggcagcctcgatagatgacagcactgtagaccagcagagcatgcaggcctccactcaaatgcaggtggagatcgagagcgacgagctgccgcagacggcagaggtggtcgcagcgaaccccgaggccatgctggacctggagcctcagcatgtggtgggcacggaggaagcagggctgggccagcagttggcagatcagcccctggaagcagatgaagatgggtttgtggctccacaggaccctctgcgagggcacgtagaccagtttgaagagcagagccctgcgcaacagtccttcgaaccagcagggctaccccaaggttttacagtgactgatacgtaccatcagcagcctcagtttccacctgtccaacagctacaggattccagcacacttgagtctcaggccctctccacaagcttccaccagcagagcttgctgcaggctcccagctctgatgggatgaatgtaacaactcgcttgattcaggagtcatcccaagaggaactggacctgcaggcacaaggttcccagtttctggaggacaacgaggaccagagcaggcgctcttacaggtgtgactattgcaacaaaggctttaagaagtccagccacctgaagcagcatgtgcggtcgcacaccggggaaaagccctacaagtgcaagctctgtggacgcggctttgtttcctctggggtcctcaagtcccacgagaagacacacacaggagtgaaggcgttcagctgcagtgtgtgcaatgcttccttcaccaccaatggcagcctcacccggcacatggccacacatatgagcatgaagccttataagtgtccgttttgtgaggagggtttccgaactacagtgcattgtaaaaagcacatgaagagacaccaaacagtcccctctgctgtgtcagccactggagagacagaaggaggagacatttgtatggaggaagaggaagaacattctgacagaaatgcatcacggaagtctcgtcctgaggtcatcactttcacggaggaggagacagcccagttagccaagatccggccgcaggagagcgccacggtgtcagagaaggtcctggtgcagtccgcggcagaaaaggaccgcatcagtgagctgagggacaagcaggcggagctgcaggacgagcccaagcacgccaactgctgcacatactgccccaagagcttcaagaaacctagcgacctggtgaggcatgttcgaatccatactggagaaaagccatacaaatgtgatgaatgtggaaagagttttactgtgaaatccactctcgattgtcatgtgaagactcacacaggtcagaagctcttcagctgtcacgtctgcagcaacgccttctccacgaagggaagtctgaaggtccacatgcgcctgcacacgggagccaagcccttcaaatgcccgcattgcgagctgcgtttccgtacctcgggtagaagaaagacacacatgcagtttcattataaaccagacccaaagaaggccagaaagcctatgactcgaagctcatcggaaggactgcagcctgtaaacctcctcaactcctcctctactgacccaaacgtgtttatcatgaacaactctgttctaacaggacagtttgatcagaatctgctgcaaccaggactggtgggccaagctattctccctgcctctgtgtcagctgggggtgacctgaccgtgtctctgacagatgggagcctggctaccctagaaggcatccagttacagttggctgctaacttggttggaccaaatgtacagatttctggaatcgatgctgccagcattaataacattacgttgcagattgatccaagcattctgcagcagacgctacagcagggcaacctattggctcagcagctcacgggggagcctggcctggccccacagaacagctctctccagacatcggacagcacggtccctgccagtgttgtcatccagcccatctcaggcctgtccttacagcccacagtgacctctgcgaacctgaccataggcccgctgtctgagcaggattcagtgctgaccactaacagcagtgggacccaagacctcactcaagtgatgacttcgcaaggtctagtgtccccctccggcggtccccacgagatcaccctgaccattaacaactccagcctgagccaggtcctggcacaggccgctgggcccactgccacgtcttcctcggggtctccacaggaaattaccctgactatctccgaacttaacactacaagcggaagccttccttcaacaacaccgatgtctccatcggccatctcgactcagaacctggtcatgtcctcgtcgggcgtgggaggtgacgctagtgtcacgctgacgctggccgatactcagggtatgctatctggaggcctggacactgtcacactcaacatcacctctcagggtcagcagttcccagcgctcctcacggatccctctctctcgggccagggtggagcaggctcgccgcaagtcatactagtgagccacacgccacagtcagcgtctgctgcttgtgaagaaatagcctaccaggtagctggcgtctctgggaacctggccccgggcaaccagccagagaaggagggccgggcgcaccagtgcctggagtgtgaccgcgccttctcatcggcggcggtgctcatgcaccacagcaaggaggtgcatggccgggagcgcatccacggctgccccgtgtgcaggaaggccttcaagcgcgccacgcacctcaaggagcacatgcagacacaccaggccggcccctctttgagctcccagaagccaagagtgtttaaatgtgacacttgtgagaaggcatttgccaaaccaagccagctggagcgccacagccgcatacatacaggggagcggccgttccattgcacgctttgtgagaaagccttcaaccagaagagtgcgctgcaggtgcacatgaagaagcacacgggggagcggccctacaagtgtgcctactgcgtcatgggcttcacgcagaagagcaacatgaagctgcacatgaagcgggcgcacagctatgctggagctctgcaggagtctgcaggtcacccggagcaggacggggaggagctgagccggaccctccacctggaggaggtggtgcaggaggccgccggcgagtggcaggccctcacccacgtcttctgatgcgagttggaagtacacctttaagaatgtttctgaagttacgttttgtgaagagcaaagcacttggaatctctgttttaaagcttcaagtgttaaaaatgctacaatagttttttatctataaaattatctaaagaatcattgtctttcagagactcataggaaaaaaaaactgggaaaagtgtcaccgcattgttctcttttgtctacaaatcactgaactcaggtactactgtaggcagtttcctcctcagtctcctccgtggctagtgtgtctagttcacgaagcaattaactgggtcttactatcattgtagtgtgatttctttgtattagcaaagacaaaaacgctaacattgaaaaagtatgtcagattttccttcatgtttctggttataagaagcatagcttacaaagcaagcgtaagattgaggcatgaagttcagaaaaaaaagtgttacaacacacagggaagttttttccactcttttctctgtgcattttgaaaattagtcaaaatggactcttttcagtctaccataagttaatataactgataccttgagagatggctggaccaattctctccatgacaaatgtttaatcattagttacaagaatgcagtatctggggcgtcaacatggggactcgagtaaacctgacccaccaataaggattcagctgtccacacgggctggcgacacacttaccgcatcaatctgtgttcaggtccagggttacataattgcagaagcacaagccatacatcgcaggtaggaaaccacagaaccgtctgcaaggagcaagcaacggtggccctgtccaccccagcaaataagaagcatatctgtagcttaaggccacgaatccgtaaaaaccccatgactttctcttcgtgcataaacagatgtatttttgatttcagggaattctttagtatcgtcaatggtgccacataaaacatgtcccaaaccaaatcccacccgtgctgggcagagtgcgtgcacgccattcctacagcattccaaagatggaaggttctttacttcatgttaatttttcctttgaaattatttatatgttctatatataaatacatatgtacatagatatatgggcctctgtgtggctgaacagtatattttgtaaatataagtactagtcctaattgcagaaagagcgtcagtttcacctccccacgagcacttcagatcagtattgtattcattttattcataaatggatatctttttcattgtcatataaagctgggttttatttttttttcctgaaaaataattgcctttattttctctcgttgcctccttggtttcagaagagagtagttttattataaatattgtatggactttgtatattaagagaggagctcatttcagattcctaaagaaatagacattttactgttattttgaaagggcatcttttgatttttttgttgttgttgttcacttttggcatatgtatataagtaatattgacggtgatatgaaaacttttgttatgtgaagatatttaagtcagaaaattgttaaataatattacttcttttccaaactgctttgtgtattgtatatttttttaagaaaaagaaaagccttatttgacttatgcttgtgatactggacttcttaccaatccggaggtttccttccttgaatgtcagtgtgtaaacctggctgtagccgcatatgcagaataactgtaattgtgctagagttttaaaggttctgcttttaatgcactttttattttataattttgtattgaaatattttagaaatgttgattaattttggtgaaaaaatatccccaaagtggaaattattggaattttaaacttttgttcttgctgggttatttattttgattttagcattaaatgtcatctcaggacatctctaaaaggggttgtttaattcctaattgtatagaaagctagtttggtgaattgtattggttaattgactgtttaaggccttaacaggtgaatctagagcctacttttattttggttaaagaaaaagaaaatatcaataattcaattttgtgtcttttctcaatttattagcaaacacaagacattttatgtattatttcgatttacttcctaattataaaagctgcttttttgcagaacattccttgaaaatataaggttttgaaaagacataattttacttgaatctttgtggggtacaggttgatctttatattttactggttgttttaaaaattctagaaaagagatttctaggcctcatgtataaccagggttttgaggataaagaactgtatttttagaactatctcatcatagcatatctgctttggaataactataaataaaagatgaagttaggaaaaaaaaaaaaaaaaaaa

SEQ ID NO: 1281 - DNA, 1622 bp, Homo sapiens
tttccagtccagggccgctgagagtgggggtggctgggagcagcgcagcctccggaggaggaggcggaggccgaggaccaggaatcaccttcaagcctatgtcgtgaggctttggcagaaattaagaaggaaatatctccattgttcattggcatggaaaaatgttcagtgggaggattagagttgactgaacagactcctgctttattagggaatatggccatggcaactagtctcatggacataggggattcatttggtcatccagcttgtcctttagtcagtagatctaggaactcaccagtggaagatgatgatgatgatgatgatgttgtgtttattgaatctatacaacctccttcaatttctgctccagcaatagctgatcaaagaaacttcatatttgcatcatcaaaaaatgaaaagcctcaaggaaattattctgtaattcctccttcttcaagagatttggcatctcagaaaggaaatataagtgagacaattgttattgatgatgaagaggacatagaaacaaatggaggagcagagaaaaagtcttcctgttttatcgaatggggacttcctggaactaaaaacaaaaccaacgatttggatttctccacttccagtctttcaagaagtaaggtaaatgcaggaatgggtaatagtggtatcactacagaattgactctgaaatacattattactaatgttacaaccttagaaacaggtataagctctgtgaatgctgggcaagatgtgaacataattattacatataaaacatcactatagaataccaacttgggagatgtcgctaaaggacttcagtcaagtaattttggtgttaatatacaaacgtacaccccatctttaactccacagaccaagactggagtaagaccttttaaccctggtagaatgaatgtggcaggagacttatttcagaatggagaatttgcaactcatcatagtcctgattcttggatctcccagtcagcttcatttcccagtaatcagaaacagccaggggtggattctttatcaccagtggccttacttcgtaagcagaatttccagcctacagcccaacaacaacttactaaaccagctaaaatcacttgtgcaaattgcaaaaagcctttacagaagggacagacagcttatcaacgaaaaggatcagctcacctcttttgctctaccacctgcctttcttccttctctcataaacgtactcaaaacacacgaagcataatatgtaaaaaagatgcatctacaaagaaggctaatgtcattcttccagtagaatcaagcaaatccttccaagaattttatagtacatcttgtttgtctccctgtgaaaacaactggaatcttaaaaaaggagtttttaataagtcaagatgtacaatttgtagtaaattagcagaggtctggatttttatacctaagttgttgtttaggctaacagtgataattttaacttttaagtgctattatgtactctttcatctacataatgcacgtgttctggatgtataacatgaagctgaaaggaagaataaggatatgttagaactatcttatgggatattttataaataaaattccatttgcatagc

SEQ ID NO: 1282 - DNA, 4244 bp, Homo sapiens
tttaaactgtgctttctaagcacagtcaggtagcaaaagtaataaaaaggatggttgaacaagttttcttgtatgttccaggatatgtttgggacttttctttgtttattatatgagttgttccctttgaaattaaagctattttgtaggttttgtgggacataatttgataagtagagttaattaaatttcttctggaagagatctaaattcttattcttagtgagagactgtagttaaaggaaggcttttagaacttgggttcaaggaagatggagatgcgtcggaagctctttggcgggggtgaggaagttcagaaagtgtgcattttccttctggcatttaggtcttgtccgtgtgatttggtggtgcttgggtcataagcctgattaaaattcagggacatgtaccacggcggccaaagcggaattaatttttttatatggggactggagcgctgaaaagttgttcctgaccaggctctaatgagaaattcctctctccccaggttatgaagacagtatggagtttccagaccatagtagacatttgctacagtgtctgagcgagcagagacaccagggttttctttgtgactgcactgttctggtgggagatgcccagttccgagcgcaccgagctgtactggcttcatgcagcatgtatttccacctcttttacaaggaccagctggacaaaagagacattgttcatctgaacagcgacattgttacagcccccgctttcgctctcctgcttgaattcatgtatgaagggaaactccagttcaaagacttgcccattgaagacgtgctagcagctgccagttatctccacatgtatgacattgtcaaagtctgcaaaaagaagctgaaagagaaagccaccacggaggcagacagcaccaaaaaggaagaagatgcttcaagttgttcggacaaagtcgagagtctctccgatggcagcagccacatagcaggcgatttgcccagtgatgaagatgaaggagaagatgaaaaattgaacatcctgcccagcaaaagggacttggcggccgagcctgggaacatgtggatgcgattgccctcagactcagcaggcatcccccaggctggcggagaggcagagccacacgccacagcagctggaaaaacagtagccagcccctgcagctcaacagagtctttgtcccagaggtctgtcacctccgtgagggattcggcagatgttgactgtgtgctggacctgtctgtcaagtccagcctttcaggagttgaaaatctgaacagctcttatttctcttcacaggacgtgctgagaagcaacctggtgcaggtgaaggtggagaaagaggcttcctgtgatgagagtgatgttggcactaatgactatgacatggaacatagcactgtgaaagaaagtgtgagcactaataacagggtacagtatgagccggcccatctggctcccctgagggaggactcggtcttgagggagctggaccgggaggacaaagccagtgatgatgagatgatgaccccagagagcgagcgtgtccaggtggagggaggcatggagagcagtctgctcccctacgtctccaacatcctgagccccgcgggccagatcttcatgtgccccctgtgcaacaaggtcttccccagcccccacatcctgcagatccacctgagcacgcacttccgcgagcaggacggcatccgcagcaagcccgccgccgatgtcaacgtgcccacgtgctcgctgtgtgggaagactttctcttgcatgtacaccctcaagcgccacgagaggactcactcgggggagaagccctacacatgcacccagtgcggcaagagcttccagtactcgcacaacctgagccgccatgccgtggtgcacacccgcgagaagccgcacgcctgcaagtggtgcgagcgcaggttcacgcagtccggggacctgtacagacacattcgcaagttccactgtgagttggtgaactccttgtcggtcaaaagcgaagcactgagcttgcctactgtcagagactggaccttagaagatagctctcaagaactttggaaataattttatatatatataaataatatatatatatatacatatatataaatagatctctatatagttgtggtacggtctaaaagcagtcttgtttcctggaaataaaaagttgggatattaacttgtttttgcactttagaatagcatgagaatctcactaatttagcattctgataaaagaaactttagagcaagtcagaatagagaggtgtttttcctttgaggggataggggaagtaagccaataagaaccttttaaacaaatcgtcctgtcacaaaatgctttcatatggcttaattttgtcaacactgcattgtcttttgagctcttttttcccccccaacaaagtttttttgttttttgtttttttttttaagtagaaattccctccagttttattagcctctttatatgtctcaaattgcatgaattttttctggctgttggaaacctgaatgcttttagacccaaatggaaaatttctgaaatgctggattatctatttttaaacaagcagttgacttaaaactttctgtggcaacttctggttttctgacagttcccagtgagagaaatgctgaaagtacactgggatcactgggacactgtcttatgaaggtttgcttgggatgaaaaaggatattgcagcttcagcagtgttgaactgtgtgtttaaaaatgtgaattactgttattgtatactgtaattgattacatgggctgggggggtgtcaaagaacttgacaggttgtgttgatgctcttagttgagtcttgaaaagtaaatattaacgctacagaaatgcatgagtttcaatatattttttgtctttgtttgcattgtataactttaacgagtgagtttaaaattatttaatttccttagaaaaatagcaccatttggaaaaaaaaactggtgttatgaagaacgtaaatgcactgtttttatttttattttatataatttaaattgactttcccactgtctttaagttgaaactgttaagctgaataaaaacttaagctgcaaattgataacttcgctacataacaaggaaaatataaatgtttacaaacagcttaaagatttgcatgtgcagtgtgcatttataacaaacttctaattgcacaaaacccatgccagctcagagtttaggtgtacacatttacccagttgagcgttcttagaataactactgcacaagttgacaataggtcgttctctctttttttttgtttgctccctttttctttttctccccttcctccttaccctccctcccttactctccccccccaccaccaccctccacccccaactcatgaaaagattctatggactgaaaaagccccaggctgaaaggactggactgccttgattgacatggggaagggggttagtagactatgtggattgcggcagcagaggctgcagcctaacgtgtggttttaatgaccagcacgcaaggcaaaagcattttgcacagtgtttgttttcctgtcttgcacttacaaataaggtctatgggagtagcatggaaaacgtttgctgtttttcccttttttttttaattgcttttgtttaaaatttgatcgccttaactactgtaaacatagcctatttttgtgcttaagatactgaatggaaaactccattgtgtgttgctggactgttttggaaatatttggttaaatgtgtgttaatttggctgtaatggcatttaaagcaaacaaacaaacaaaaaaagctgtgaaaatggccttggagcattatctttagttacttgaagagtttctagtttttttaaaatacagtttatgttaaaataatttttattaatttagagaagacaatcaatgtctgtgagaaaacggactttcttttggattttctttttgtggtcattgtgagtgattgctttttccttttcttagtttcacattcttcctttgttctaaaacttagactgacatctagctttgacaatcatagtatgttttattttcctgagggggaataacttataatgctgtttagttttgtactattggtgtgttggtgaatttttaaactgtgtgctaactgcaataaattatatgaactgagaaaaaaaaaaaaaaaaaaaaaaaaaaaaaaaaaaaaaaaaaaaaaaaaa

SEQ ID NO: 1283 - DNA, 2406 bp, Homo sapiens
ctagtcccgattatggttattacagtttgatgaaatgtggctgagatcattggcactgtggagattaagaaatgtgaggtcagagtgttgggtaaattgttcctgcgagtgttaaggttgtcaggataatggtgggaatggggtgaagatgacaactcagcaatgacacaagaagagagtgacacagaaagattcagtagctgagaacttgagcgtagatatgttgtgggcaggagggaaatgatttggatggaagtagccaagtaagtgagaaaggaaagactttccaacaaaacttggcttagctcactcagatccctgagctgcaaacttcttctatacctttcttaccttttccagtgctgctgacttcaccccacttgcagggcatttgtgcagatggttgtttgttgaggaggaatgtgcttaatgttttaggaaccagttacattcaaggatgcctctgtggccttcaccgaggaggagtgaggtcacctggactctgctcccaggaagctgtgcggagctgtgatgctgggcaactacagaaacttggtcttggagacttgaatgaaaattctgtggagaatcttcagcagaaaacacttcaggatctgttacatgagctttcctcctggctagttttggaaggcatggccagtacaattactggaagtcaggattgtattgtgaatcatcgaggggaagtggatggggagcctgaactagatatttccccttgtcaacagtggggagaagcatcttctcctatttccagaaacagggacagtgtgatgactcttcaaagtggttgtttcgaaaacattgaaagtgaaacatatttgcctttgaaagtctcaagccaaatagacacacaagactcttcagtgaagttctgtaagaatgagcctcaggatcatcaggaaagcagacgtctctttgtaatggaagaaagcactgagagaaaagtgataaagggggaaagttgttcagagaaccttcaagttaaactggtgtctgatggacaagaactggcctcgccattgttaaatggtgaggcaacttgccagaatggccagttaaaagaatctttggatcccattgactgtaactgcaaagacattcatggatggaaatcacaggtggtcagttgtagtcagcagagagctcatacagaggagaaaccctgtgaccataataactgtgggaaaatacttaacaccagcccagatggtcatccatatgagaaaatccacactgcagagaaacaatacgaatgtagtcagtgtggtaagaacttcagtcaaagctcagagctactacttcatcagagagaccacacagaagaaaaaccctacaaatgtgagcaatgtgggaagggcttcacaaggagctcgagtctgcttatccatcaggcagtccacacagatgagaagccttataagtgtgacaagtgtgggaagggcttcaccaggagctcaagtctgctcatccatcatgccgtccatacaggcgaaaaaccttataaatgtgacaagtgtgggaagggctttagtcagagctccaaactgcacatccaccagcgagtccacactggagagaagccctatgagtgtgaggagtgtggtatgagcttcagtcagcgctcaaacctgcacatccaccagcgagtacacacaggagagaggccctacaagtgtggtgagtgtgggaagggcttcagtcagagctcgaaccttcacattcaccggtgcatccacacaggagagaagccttaccaatgctatgagtgtgggaagggtttcagccagagctcggatcttcgcatccatctcagagtccacactggagagaagccctatcactgtggcaagtgtgggaagggatttagccagagttccaaactcctcatccaccagagagtacatactggagagaagccctatgagtgcagcaagtgtgggaagggcttcagccagagctccaaccttcacatccaccagcgggttcacaagaaagatcctcgctaactgacattagcccattcaggtcttcacagcgctcatactgtaaaaactgttaaatatttagtatcactcttactttatattctacaaaggagagagatgtaagggttatttagatatgttccctcactgaaaaatcactcattcaaaatatttaagtatcaagcactttgttatgctgtacaatgaatggattgttcttgtttctcagatgggtagagtaaaagtgtctgtactttacaattcaactacatgttctacccagcattttaacggcaagaactttatatttattctcaagcagggcatgtttccctttgttcacattctctgagaaattgaaactctggtttctcttcaaaaaaaaaaaaaaaaaaaa

SEQ ID NO: 1284 - DNA, 6311 bp, Homo sapiens
cagcccgcgccgggggcttctgggaaaaggcttgtgaacggcgtttctgcgtctgccgtggacagcgaagctgctgcggttcctgagccggaggtttgcgccggagtgcctgtgaagaaaacggggtattgccctgaggcttatattctgcctcagttgtcttttcttgaaatattataaatcagaatgtctgcacagtcagtggaagaagattcaatacttatcatcccaactccagatgaagaggaaaaaattctgagagtgaagttggaggaggatcctgatggcgaagagggatcaagtatcccctggaaccatctcccagacccagagattttccgacagcgattcaggcagtttggataccaggattcacctgggccccgtgaggctgtgagccagctccgagaactttgccgtctgtggctcaggccagagacgcacacaaaagaacaaatcttggagctggtagtgctggagcagtttgttgccatcctacccaaagagctacagacttgggttcgagatcatcatccagagaatggagaggaggcagtgacagtgctggaggatttggagagtgaacttgatgaccctggacaaccggtttctctccgtcgacgaaaacgggaagtactagtagaagacatggtatctcaagaagaagctcagggattaccaagttctgagcttgatgctgtggagaaccagctcaagtgggcatcctgggagctccattccctaaggcactgtgatgatgatggtaggactgaaaatggagcactagctccaaagcaggagcttccttcagcattagaatcccatgaagttcctggcactctcaatatgggtgttcctcaaatttttaaatatggagaaacctgtttccccaagggcaggtttgaaagaaagagaaatccctctcgaaagaaacaacatatatgtgatgaatgtggaaaacacttcagtcagggctcagcccttattcttcatcaaagaattcacagtggggagaaaccttatggatgtgttgagtgtgggaaagcattcagccgaagttccattcttgtgcaacaccagagagtccacactggagaaaaaccttacaaatgtcttgaatgtgggaaagcctttagccagaattcggggcttattaatcatcagagaatccatactggggagaaaccttatgaatgcgttcagtgtgggaaatcgtatagtcaaagctcaaatctttttagacatcagagaagacacaatgcagaaaaacttctgaatgttgtgaaagtttaagaaattgaaaaaaaaaaaagaatcagcactcaggtctttttcttcagaaatgaagacaaaatttaaaatatgaaatgatgcagaatagttttttccctattgactgtcagaaaatccactgggaaatgtaaaaatcttcactcaccattatgatatttatcttgaaagaaatggtgtcatacctgcctagaaactgaaattttaaacttaattcaggtcttaatgcctaaattttccatgtgatgtttatagtctgtattacttctccaaataatgaactacctgattcattgtccctttcttgaaagtttcttttttaagacaaatacattatttctgcattgatcattgaaatgttctttatatggatacattcccttatatattaaaaggcaacaggaattacaaagtctgaaaaccattttaaaccatcttttaaaaatttacccttatttccttttacctaatttgaatatgcatttgagaaaataagaggataaaggatggctaagagcctcaaaatgaaccataagatctcagataagaagtgatggtgataaaacatcaaaaagtgaatggaacaccttgattggggaagatatgcaaatactttgatctaagaattgaaatgtatcaagaatttatattttgcctgcaggaaaattcaaaagctactcatcctctctataatttggagtcatcttactaatgaaaataatgttttcccatatattattaaaaagcatacagtctaaataataaacagttgtaaaataatgaaggtagaaattataacactagggaaaaatttgtagcggatggcagtgttgaaggcaaatgtaaacataagggtaatggtctgtcatggcttttagaaaaagatgatagagttcatcattattttgccttcatctttgttaaggacagaaaattccctgacaggtgggcaagtatcaggttacctattttttattcctttggtacaaaagggttgaacgtcaggctaaaaaagcagccatgcatttattattaaacattttctaccgacaaggcactgtgctaggtactgtaatcctaccataagtaggtaggtatttcttccactgtaaatcataggggtttgctgttttatgtgagttagcctcttccccttgtctgagcattcctcaggggaggtcacctgtgaggttcccagaactgtagttttttttaccagggtgttgtatttggagggggaggaggactcggctcaaaagagctagctggctctccagtgttcagaggtgagtccacgatactcttaccacaatttggaagtttgtgaatctttttaaagaactaatcaatctctaatagcattgaggttgtacctacatattaagttgaatggactgttctatttaaaaaataaacaactagacaattaactagtttattaacctatcacaattgaatttttttttaattttcagtcttaacacattttttaaaatgtattaaagtaatacattgtagtagtaggattatatactccttggctgagaattccaagtactgtggttctactgtttagtggaaaactctggaagttaaaatatagaatatgagaggaggcttttttataatgggcatcattgtgtggaaaatgacccatgtgaatacaaatatttcctagttcagagattttggttatatctggtgcttggatcaagtttaaaaatggaaggtgagattttgcatgagcctattaaaaagcatagtaataaatgcaaggccagctggtggaaaagtgaggcagaatggagcttgtttataggttttctgataacaattataaaaaatgtgctttatagattaagatttattgaagtataaatatgtagtaatgatataatgtattttaagttatacaagaaaatgtagggacttttgtttgggtctttttctctttgtggctgaggggaaacaagtcagtgtccaataaagctgtaaactcctctgctctaagataaatgatgtgatttatttatttataactggcttctttccaagtaggttttcaggtggcatatttggaagacggctggaatgacagaattcttgtatcagagtaggtaagaagggagcaacctctcaatggctattatgtcatgctttttaagatcgtatgcggttcctatatacaaggaagcttccctgtggtagatttgtcataaatgccaaagatatttggtaatgtgagtgtagaaaaagtagtatgagggttggcaaatactgtttttgtcttggcagctctaatatctgcattgttcagaaaggattctgaggctaaggcaaagctctgtgggaaaaagggactggaccaaaaaaaactggatggtggcacacaagaagaggaaatgatgagatgtgtactttctatctctggttaggcttagtccccactagacaaattgattttaaatactatgtagtgatttttaaattccatccacacattcattacccacacagataatcatagaaatttgggggagtgcctagcttctgatgaagtggtgatatggcagtgccaagcagtggcatcgccagagtatctgtttggttagcaaatgagcagtcattttaggtcatgcagattgctgatatctgcccagtagccactgagcatttgctggttttttcttctggctttcttggaggttaagctctctgtagtcatacccagttggtacttgatctttagcaatatgtctcatattcatgtaaattgaagggagggttacatgtactgaaataatctgcatgctaggcattggcttagacaccgtacctatctcacttagatttgtggactaggaaagcaagattcagagatcatgtgacttgcatgtggcctagagataaaattcaaatctggttctgtagactccagggacatattcaccatgccatgggtggtggctattaaaccttgataaatttgtgtttatggttaacaaatgtgaaagctattaaacattgctggtttgaattttttacagtgcagaaatgtaaaatgaaaaaggatatttcctttcacagtgttaccgagaagtcatgataatttcgtttgttcttccagatttaggcatatacttatttaatcaataatgtgttaacagctgacacctgtggttgctgtgacaggcactatttgaagtgctttatcatggattaactcttaatcctcagctaccgtataaagtaggacataaccccatttcacatgcactacactgagacttgcctcctctccccccacattgaagatgttcttttttcataactatatactattccattgcatgaatattctgtaatttatttaatcccctatggattgataattaggttcattatagatagaagtgtaattaacattcctgtacatgtattttgctacttgtgtgggtatttctgtaggatgaataactagaaatttattggatcaggtttcacatttgcagttttgaaaactactaccaaaaagatttcaccaatttacaactccatcattagtaagaatgcctgtttgcctatagtctgccaaccctgaatccttaaaaatttttgccaatctggtaggcaaaatttctttcttttctttgaatattaatgaggaggaacatcttttcatgtttcttggccatttgcatttcctattatgaattgcttttgcccattttcctttttttaattatgaaagtctaatgactaccttctcattgtataaaaaacacagttctttgaatagagagacccttttctccaatgctaccaatcacattccacttaccacagtttaacatacatcctctagtcacctttccgtacgaatatacatacacataaaaacactttttacataaataggatctcatattctgtagctttttaaaattttggtctcaaaaaaagataacaggtctttaaatttctttaatggttgaatatgattaaatactatgaaaatgccattatttattcccttaatttttttcctctcgctattacattgccaaagtaaacatcctattcagatgtctttgtgcatgtgtgtgaatatttctttagtctggagtccagtaaggtggatttttggatcaaagggtttgttctctgtccaccttcagtcttcccaaaggccttcataactgtattttcaccaagtgtatggagaatgttcatttccccatataaccatacctacacttgatagtttttatctgttgggcgaaaaagaaccttttcttattttgcatttccctgattataaaaaaaaatggtgagattggggttattttcatgtttattggccatttatagtttactgtggattgtttgtatcccttacctgctttctattgggttatgtgtggatatattgtttttatttgttcagcatctccttccccatcttctggtaacacaacctttatttatttgtggggaacctattccctgtggcttaggtgagcatgtgaccaggcctggcctcctgagtcccacagcttcctagccacagtgataaaagaatgggtatataacttaagccaggctaaggaaagcccttaacagaacttctgctggaactactggaaagaaggctttatggagatcccaggaaccaaggaccatgtaagcctgaatttgtgccatgtggagagagtctgtctgaggagaaactcggatgctagcagaaatggaaagagaactaagttctgatgtcatttttctggaggccctagatccagctgtgcctaaagcctgccctacctccggactttaaagttttgtgagccaataaagtccctttcttgtttaagataattgaattgagtttctgttctgattaatataggttatttgtattttcttattgatttgtagaaaacctttgtaattttaaattctagactttatgcactatataagttaataaaattagcatggccttccatgatttggcctgtgtc

SEQ ID NO: 1285 - DNA, 168 bp, Homo sapiens
tttgaatgtactgaatgtgggaagttcttctatgtgaaggcatacctcatggtacatcagaaaacacacacaggggagaaaccctatgagtgtaaggagtgtgggaaagccttttcccagaagtcacacctcacagtacatcagagaatgcacacaggggagaaaccc

SEQ ID NO: 1286 - DNA, 2351 bp, Homo sapiens
ctgtgcttatagaggcccgtcctctgtggccgtgtgacctgcaagtattgggagagccacagctaaaccccgggacccctggaagcctagaaatgggaccattgcaatttagagatgtggccatagaattctctctggaggagtggcattgcctggacactgcacagcggaatttatatagggatgtgatgttagagaactacagaaacttggtcttccttggtattgttgtctctaagccagacctggttacctgtctggagcaaggaaaaaaacctttaactatggaaagacatgagatgattgccaaacccccagttatgagttctcattttgcccaagacctttggccagagaacatacaaaattctttccaaatagggatgctgagaagatatgaagaatgcagacatgacaatttacagttaaaaaaaggctgtaaaagcgtgggtgagcataaggtgcacaaaggaggttataatggacttaaccaatgtttgacaactacccagaaagaaatatttcaatgtgataaatatggaaaagtctttcataagttttcaaattcaaacacatataagacaagacatactggaataaatcttttcaaatgtataatatgtggcaaagcttttaaacggtcctcaacccttactacacataagaaaattcatactggagagaaaccttacagatgtgaagaatgtggcaaagcttttaaccaatctgcaaaccttactacacataagagaattcataccggagagaaaccctacagatgtgaagaatgtggcaaagcctttaagcagtcctcaaaccttactacacataagaaaattcatactggagagaaaccctacaaatgtgaagaatgtggcaaagccttcaaccgatccacagaccttactacacataagatagttcatactggagagaaaccctacaaatgtgaagaatgtggcaaagcctttaagcacccctcacacgttaccacacataagaaaattcatactagagggaaaccctacaactgtgaagaatgtggcaaatcctttaagcactgctctaaccttactatacataagagaattcatacaggagagaaaccctacaaatgtgaagaatgtggcaaagcctttcacctatcctcacaccttactacacataagatacttcatactggagagaaaccctacagatgtagagaatgtggcaaagcttttaaccattccacaacccttttttcacatgagaaaattcatactggagagaaaccctacaaatgtgatgaatgtggcaaaacctttacctggccctcaatcctctccaaacataaaagaactcatactggagagaaaccctacaaatgtgaagaatgtggcaaatcctttactgcatcctcaactctaactacacataagagaattcatactggagagaaaccttacaaatgtgaagaatgtggcaaagcttttaactggtcctcagaccttaataaacataagaaaattcatattgaacgaaaaccctacatagtgaagaatgtgacagatcttttaaatgttcctccacttttaattagcataagataattcatactggagagaaaccctatgaatgtgatgaatgtgggaaagcctttaaccagccctcgactcttagtaaatttgagagtttatatggaacacaaaccctacaaatataaagaatgtgacaaagctttttaaggaagttctcaacccttattacacataattcataccaaacagaagccctacaagtgtgaagaatgtggcaaaacctataaacctataacaagttctcaattcctttttttttgagatggagtttcactcttgtcaccgaggctggagtgcaatgacatgatctccgttcactgcaatctctgcctcctgggtttaagccattcttctgcctcagcctcccaagtagctgggattacaggtgcccaacaccacgcctggctaatttttggatttttagtagagatggggtttcacaatgttggccaggctggtctcgaactcctgacctcaggtgatccacctgccttggccttccaaagtgctggggttacaggcgtgagccaccatgcctggctacaagttcttaattcttaagagacaccatgcctggctacaagttcttaattcttaagagacatggcgataattcatgctgaagaggaaatctggaaacctgaaagatgcgacattgcttttaccaacacctccacatttcctatacataaaaataaattatactagtgtaataccctagaaatgtataaaatgtgacaaagcctttaaaaaaaaaaaaaaaaaaaaaaa

SEQ ID NO: 1287 - DNA, 3062 bp, Homo sapiens
gggatatggcggggcctttgtctctcgctgtcgccggagtcccaggtctgtcttcactgctctgtgtcctctgctcctagaggcccagcctctgtggcgctgttaccagcaggtattggagatccacagctaagatgccaggaccccctagaagcctagaaatgggactgttgacatttagggatgtggccatagaattctctctggaggagtggcaacacctggacattgcacagcagaatttatatagaaatgtgatgttagagaactacagaaacctggccttcctgggtattgctgtctctaagccagacctgatcacctgtctggaacaagggaaagagccctggaatatgaagcgacatgagatggtggatgaacccccaggtatgtgtcctcattttgctcaagacctttggccagagcagggcatggaagattcttttcaaaaagcaatactgagaagatatggaaaatatggacatgagaatttacagttaagaaaaggctgtaaaagtgtggatgagtataaggtgaacaaagaaggttataatggacttaaccagtgtttcacaactgcccagagcaaagtatttcaatgtgataaatatttgaaagtcttctataaatttttaaattcaaacagacctaagataagacatactgaaaagaaatctttcaaatgtaaaaaacgtgtcaaattattttgcatgctttcacataaaacccaacacaaaagcatttatcatagagagaagtcctacaaatgtaaagaatgtggaaaaacctttaattggtcctcaacccttactaatcataggaaaatttatactgaagagaaaccttacaaatgtgaagaatataacaaatctcctaagcaactctcaacccttactacacatgaaataattcatgctggagagaaactctacaaatgtgaagaatgtggcaaatcttttaaccggtcttcaacttttactaaacataaggtaattcatactggagtaaaaccctacaaatgtgaagaatgtggcaaagcatttttctggtcctcaaccctaactaaacataagagaattcatactggagagcaaccctacaaatgggaaaaatttggcaaagcctttaatcggtcctcgcacctcaccacagataagataactcattggagagaaatcttacaagtatgaataatgtgccaaagcctaagaaaaccctcaattcttaatagatataagattattcctactggagagaaactacaaacctgagagaggcgctaatgcttttgacagtacctaaaactttaaagaaaatcattctgctgaaaaatcctagaaatgtgaagaatgtgaaaaagcctttaaatgattgtcacacttgattgtaggtaagataattcatactggagaaaactaccagtgtgaacaacgtggccaagcttcgacaatgctcacaccctattgcacaggaaagcatttatacttgagaagaaatgtacaaatattggcaaagtaaaaaatccattaacacctgctcacatcttactcaaaattgtagagttcatagtaaataaaagcattaaaattctaattactctcagaagatctgtcagaaagtatgtctttaaagtatagaagagcatttattttgaaaaaaacattacacatatgaagaggattgtaatatctttacttgtaccacagatcttattgtacacattttatactagagaaaaaccctcaggcagttgttaaaattttgttgaacatcagggagtttaagaaaaccctgcaagtataatgaatttggaaaaacattttttcaaaaactacaaattataaaacaccaaagtgttcatactaaaatatatttttgcagatacattaaatatgaaagatattcaatccaaaattaagtctatgtaaatatcagggaataattcacagtagaaatatctagggcattcaagctttagacattacactaaatcagagtgctgagtatagaaaataatacaaacagatttgtctaaacatttgtatataactttaaaaatagaatattttttggagggttataattacattcaaagtacttttttttgaaaatacagattttttttaaaagtgaataatgtgttcaactcttaaattcatgctgtttcatcattgctggtgtattcatatgtgaaagcatgtgactaattgttgctgcataaaagatatgagattcttttttattaggcattatttatgaccttttctatgaaaagataaggacattaaaatgtaagatgcgtgaggaaaatttaggtagagaggctctttgtggttaacttataatattgagtgatgcatgaggtaggtgttcagaataatattcctctgcattattatgaatgaaaagcattcttaattttagttaaaattaagttagtcatatgttattttattaattgtacttctatgaaataatatgcagtctatttttaaattataaattatgtgtgaacttagcttttcaattcaacatttttaacatattaaatactattgtgaattcaatgaagtgttcttatgccactaactttaacctattcccttactcaaggatgtaggtaaaagatggtaacaatacactatttggtaagataatgtactgacatctctagcaatcttttttgccagtggctttaaattgccaataagttaaagaatattgttcctatgggttaaatttttattcttattttcacatttaaatttatttttcttaatttttgtggatacataatatgtgtatatatgtatgccatatatggtatattttgatgcaggcatactctatataataatcacattagaggaaatgagatatccattacctctagcatttattctttttattacaagcaattcaattgtacacttttagttatttttaaatttacaatgttattgattacagggtcatttttatggtcataataaaaaattttatacaaacgtgtaaaatctatacatttctgagttctgaataaatatttttaaaaattttaa

SEQ ID NO: 1288 - DNA, 3006 bp, Homo sapiens
ttttttttttatattacttttgtttaaaattggttttgattcatattttattatatacacaatttattagcttcataatttaccatgcaagattttagactgattaggaaattcactaggaagagtagcaggtataatgtttgtatcatattaattttattattgtcttttatttttattaaaaattttatttcagtagtctttttttattttattaaagtatatactggtttttggttacatggatgaattgtctaatggtgaagtctgagattttagtgtacccatcacctgagtagtgtacattgtacccaacttgtagctttttatcccttaccctaccttccaccctccccatttggagtctgcatagtccattatatcactctgtatgcctttgcatacccatagcttaactcccacttataagtgaaaacacggtatttggttttccattcctgagttacttcacttagaataatagcctccagctccatccaagttgctgcaaaagacattatttcatttttttatggctgaatagtattccatggtgaatatataccatattttctttatccactcattggttgatgggcacttaggttggttccatgtctttgaaattgtgaattgtgctgtaataaatataggcatgcaggtgtccttttgatgtaaggacttcttttcctttgggtagatagtagtgggattgctggatcaaatggtagatccacttttagttctttagagaatctccatactgtatttcatagaggttgtactaatttaccttcacaccagcagtgtataggcgtttcttttcaccacacccatgtcaacatctattgtttttcgtcttttatttctatcaagtattttacatatgatacttggtttagttcgaaattggcctcatccaaaccaaagattatggtgcacttgaaaaatcaaactgaatgttgtctatactcatgagagtttcctgccatggcctaagtgaaatcttgataacactgaacaaaggcttcacttgtcctcatcctttaattctgtattctgataggagacaagatccaaactgagatggagactgtttcagaagcaggaacacatcaagagtggtccttccagcaaatctgggaaaaaattgcaagtgatttaaccaggtctcaagacttggtgataaatagctctcagttctccaaagaaggtgatttcccctgccagactgaggcaaggactatctgtaattcacacaagacagaaatcttcccaagggcaattggatataaaccatccttcagtgatgtctccctctttgattttcatcaacaattacactcaggagagaaatctcatacgtgtgatgagtgtggaaagaacttttgttacatctcagcccttcgtattcatcagagagtccacatgggagagaaatgctataagtgtgacgtgtgtggtaaggaattcagtcagagttcacatctgcaaactcatcagagagtccacactggagagaaaccgttcaaatgtgtggaatgtgggaaaggcttcagtcgtagatcagcacttaatgttcatcacaaattacacacaggagagaaaccttataattgtgaggaatgcgggaaggccttcattcacgactcccagcttcaagaacatcagagaatccatacgggggagaagccattcaaatgtgatatatgtggtaagagcttctgtggtagatcaagacttaataggcattccatggttcacacggcagagaaaccattccgatgtgatacgtgtgataagagctttcgtcagagatcagcacttaatagtcatcgcatgatccacacaggagagaaaccatacaaatgtgaggagtgtggaaaaggctttatttgtaggcgagatctttatacgcatcatatggtccacacgggagagaagccatataattgtaaagagtgtgggaagagcttcagatgggcctcgtgtcttttgaaacatcagcgagtccacagtggagaaaaaccaattcaatgtgaagaatgtgggaaaggattttacacaatttcacaatgctattcccaccagagatcccatagtggagaaaaaccatacaaatgtgtggagtgtgggaagggctacaaaaggaggttggatcttgactttcaccagcgcgtccatacaggagagaaactgtataattgtaaggaatgtgggaagagctttagtcgggccccatgtcttttgaaacatgagagactccacagtggagaaaaaccattccaatgtgaagagtgtgggaagagatttactcaaaattcacatcttcattcccatcagagagttcacactggagaaaagccatacaaatgtgagaagtgtggaaagggccacaatagtaagtttaatcttgatatgcaccagaaggtccacacaggagagagaccatacaattgtaaggaatgtgggaagagttttggctgggcctcgtgtcttttgaaacatcagagactgcacagtggggaaaaacctttcaaatgtgaagagtgtgggaaaagatttactcagaattcacagcttcattctcatcaaagagtgcacactggagaaaagccatacaaatgtgatgagtgtgggaagggcttcagctggtcctcaactcgtctgacccatcagagacgccacagcagagaaacacctctcaaatgtgagcagcatgggaagaacattgtacagaattcattctctgaagtgcaagaaaaagttcacagtgtagaaaagccatacaaatgtgaggactgtgggaagggctacaacaggcgcttgaatcttgatatgcatcagagggtccacatgggagagaaaacatggaagtgtagggagtgtgatatgtgctttagtcaggcctcaagccttcgacttcatcagaatgttcatgttggagaaaaaccttagtgatgtgatggtgcaataaagtcttcactcagtcttcatgaaaaaaaa

SEQ ID NO: 1289 - DNA, 2228 bp, Homo sapiens
ggcgggacttccgttgtcctccttgtggcggtcgttttggcatttgtctggactgattacttggtagaaagccccggagcgctgggtcagcatcatccgtgactgactgagaaggcgcgagaggagtcttccccgctgcacagaggcgtggctgaggctcggcggcgcccagggtacccaggcccggcccggaataaggacatcctctctggccccgctccgctcacagagtcagatggcggcggccgagctgacggccccggcccagggcattgtgacctttgaggacgtggctgtttacttctcctggaaggaatggggtcttcttgatgaggctcagaaatgcctgtaccacgatgtgatgctggagaacttgacacttacaacctccctgggtggttctggagcaggggatgaggaggcaccttatcagcagagcacttctccacagcgggtgtcacaggttaggattcctaaggcccttccttctccccagaagaccaacccctgtgagatatgtggcccagtcttgagacagattttgcacttggttgaacaccaaggaacacaccatggtcagaaactgtatacagacggggcatgtaggaaacaattacaatttactgcataccttcatcagcaccagaagcagcatgttggacagaaacacttcagaagcaatgggggcagagacatgtttttgagcagctgcacatttgaagtatctgggaagcccttcacttgcaaggaggttgggaaggatttcctggtgagatcaagatttcttcagcaacaggctgctcacaccagaaagaagtcaaacagaaccaagagtgcagtggcctttcacagtgtaaaaaatcattacaactggggagaatgtgtgaaagctttcagctacaaacatgtacgtgttcagcaccagggagacctcattagggaaagatcttacatgtgcagtgaatgtgggaaatcttttagcacaagctgtagcctcagtgatcatttgagagttcacacttcagaaaagccttatacatgtggagaatgtgggaaatcctataggcaaagctctagccttattacgcaccgaagaattcacactggagtaagacctcatcaatgtgatgaatgtggaaaattatttaacaggaagtatgaccttcttatacatcagagagttcatactggagaaaggccttacaagtgcagtgaatgtgggaaatcctttagccatagctctagcctcattacacaccagagaattcatactggaatgaggccttatgagtgcagtgaatgtgggaaatcttttatccatagttctagccttattacacaccagagagttcacactggtacaaggccttatatgtgcagtgaatgtgggaaatcctttagccagagctgtcacctcattaaacaccggagacttcacattggagaagggccttatgagtgtagtgaatgtgggaaattgtttacttatagatctcgtttcttccaacaccagagagttcatactggagtaagatctcatgaatgtcatgaatgtggaaaattatttagcaggaaatttgacctcattgtacatgagagagttcacacaggagaaaggccatatgagtgcagtgaatgtggaaaatcctttacctgtaaatcctacctcatctcacactggaaagttcatactggagcaaggccttatgaatgtggggagtgtgggaaatcatttactcatagctctacgctccttcaacaccagagagttcacactggagaaaggccttatgagtgcaatgaatgtgggaagttttttagccagagctccagcctcattagacataggagaagtcacaccggagaaaggccttatgagtgcagtgagtgttggaaatcctttagtaaccactctagcctcgttaaacaccgaagagttcataccggagaaaggccttatgaatgcagtgaatgtggaaaatcctttagccagagctctaacctcactaatcaccagcgaattcacagtggggaaaggccttatgagtgtagtgactgtggaaaattttttaccttcaactccaacctcctaaaacatcagaacgttcacaagggataaaggttaggtaacacacatagggctgttacggactgagaagtgtccctgcaaaattcacagacataaataaataaatacgtattttcaataaaaaaaaaaaaaaaaaaaa

SEQ ID NO: 1290 - DNA, 3534 bp, Homo sapiens
ggcttccgggtttggcgggtactttgtctctcgctctagcccgagctgcaggtctcgtcttccctggtctgtgtcctcttctcctaggggcccagcctctgtggccctgtgacctgcaggtattgggagatccccagctaagacgccaggtcctcctggaagcctagaaatgggaccactgacaattagggatgtgactgtagaattctctctggaggagtggcattgcctggacactgcacagcagaatttatatagggatgtgatgttagagaactacagaaacctggtcttcctgggtattgctgtctctaagccagacctgatcacctgtctggagcaaggaaaagagccctgtaatatgaagagacatgagatggtagccaaacccccagttatgtgttctcatattgctgaagacctttgcccagagcgagacataaaatattttttccaaaaagtcatactgaggagatatgataaatgtgaacatgagaatttacaattaagaaagggctgtaaaagtgtggatgagtgtaaggtgtgcaaaggaggttataatggacttaaccaatgtctgataactacccagagcaaaatgtatcaatgtgataaatatgtaaaagtcttctataagttttcaaattcagatagacataagataagacatactgaaaagaaaacttgcaaatgtaaagaatgtggcaaatcattttgcatgctttcacaactaactcgacataagagaattcatattagagagaattcccacaaatgtgaagaatgtggcaaagcctttaaccagtcctcagctcttactcgacataagatgactcatactggagagaaaccctacaaatgtgaagagtgtggaaaagcttttaaccggtcttcacaccttactcaacataaggtaattcatactagagagaaaccctacaaatgtgaagagtgtggcaaagcctttaaccggtcttcacacattactcaacataagagaattcataatagagagaagcccttcaaatatgatgaatgttgcaaagcctttaagtggtcctcagctcttactacccttactcaacataagagaattcatactggagagaaaccctacaaatgtgaagagtgtggcaaagcctttaaccagtcctcagcccttactcgacataagatgattcatactggagagaaacccttccaatgtgaagagtgtggcaaagcttttaaccggtcttcacaccttactcaacataagataattcatactaaagagaaaccctacaaatgtgaagagtgtggaaaagcctttaaccggtcttcacaccttactaaacataagagaattcatactagagagaaggcctacaaatgtgatgaatattgcaaagcttttaactggtcctcagctcttactacccttactcagcataagataattcatactggagagaaaccctacaaatgtgaagagtgtggcaaagcctttaaccggtcttcataccttattcgacataagataattcatactggagagaaaccctacaaatgtgaagagtgtggcaaagcctttaaccagtcttcacaccttactcaacataaaataattcatactggggagaagccctacaaatgtgaagaatgtggcaaagcctttaaccggtcttcacacctttctcaacataagataattcatactggagagaaaccctacaaatgtgaagaatgtggcaagccttttaatcgtttctcataccttaccgtacataagagaattcatgctggagagaaccccaacaaatatgaagaatgtggcaaagcttgtaaccattcctcaaaccttactaaacataattcataatggagaaaaaccctacaaatgtgaagaatgtgtcaaagcttttaactgttcctcaatccttactaaacataagggaattcataatagagaaaccctacaaatgtgaagaacgtggcctggcttttaacaaatcctcaacatttactaagcataaaataattcatgctggagagaaactcttgaaatgtgatgaatgtggcatagcctcttcccagttctcaactcttactaaacatgagaacacatgtggaagataaagcctacaaatatgaagaatgtgacaaggcctttaaaagttctcaacccttattacacataatttatactggacagaaatcctaaagtgtgaagaatgtcacaaagcccttaataagtcctcaattcttaacagatataagatgtttcatactggagcgaaactacaatcctgaatgatgtcacagtgcttttaacaatacctcaaacttttctaaacataaaaaaaaattatactagtgcgaaactctagaaatataaagaacatgaaaaacttttaaatggttttcacacttgattgcaggtaaaataatttataccggagaaaactccaagtgtgaagaatataacttttaaccagtgttcacaacttattgtacaggaaagcatttatagttgagaaatggtgtacaaatataaagaatgtggaaaagtcattaatatttgctcacatattacacatcagagagttcatacttaataaaagtattataaatacaattactgtcaaatgatctttcagaaatataaacctttaaagtgaagaagagttcattctaaagacaaacattacaaatataaaggggtttgtagtgcttttacttgtatcacagattttattgtacacattttgtactagagaataaccctgaagcagttgctaaaattttgttcagcattaggaaatttatgttggagaagaattcagcaagtgtgattaatttggaaaaacattttttccataactatagcttagaaaatgccagagagctcatactaaaatatacttttgcagatgcaataaatacaaagaaatatttaattcaaattgagtttatataattatcagagaattaacagtagaaatagctaaggcactgacacttcagacattacactaaatcagattgctgagtatagaaaatccaaaactacagttggtaagtaaattaattttatgtaactttaaaatgagtagacatttctttgagaagtcataattaaattcaagtatacttttttgataaaattataaagctttttaaaagtaaataatgatgtaagtcaactctcaaattacttcatgctgtttcttcatttctattgtattcacctgtgaaagcatgtgatcaactattgctgcatcagagatatgagagatactttattaggtgggaattatatacgacctcttctataaaatagtaaggacactgaaatataagatgcataagagtctaagtgaagaggttctttgtggttaacttagtgatgtatgaagtagttgctcatgttatgagagaaaaacatttttaattttagttaaatgtaagttaaaattaaaatagtaccatataatgttagtgattgtacttttatttaataaaatgcagtacattttaaaaaaaaaaaaaaaa

SEQ ID NO: 1291 - DNA, 5159 bp, Homo sapiens
gagggcggagaccaaggctgcgcaggcgtggttggccggtcgttgcgttgggatggatcaggcggaattccagaagagaaaataatccctgtctagatgcagaggacttggttcctattccagtgctcctccggtagcagggaggcgacagaaggtgtccaactatccattaccaagaagaaatctattcgtttgagcctgagacactctttgaggtaaaaaattagaatgaaagaacctttggatggtgaatgtggcaaagcagtggtaccacagcaggagcttctggacaaaattaaagaagaaccagacaatgctcaagagtatggatgtgtccaacagccaaaaactcaagaaagtaaattgaaaattggtggtgtgtcttcagttaatgagagacctattgcccagcagttgaacccaggctttcagctttcttttgcatcatctggcccaagtgtgttgcttccttcagttccagctgttgctattaaggttttttgttctggttgtaaaaaaatgctttataagggccaaactgcatatcataagacaggatctactcagctcttctgctccacacgatgcatcaccagacattcttcacctgcctgcctgccacctcctcccaagaaaacctgcacaaactgctcgaaagacattttaaatcctaaggatgtgatcacaactcgctttgagaattcctatcctagcaaagatttctgcagccaatcatgcttgtcatcttatgagctaaagaaaaaacctgttgttaccatatataccaaaagcatttcaactaagtgcagtatgtgtcagaagaatgctgatactcgatttgaagttaaatatcaaaatgtggtacatggtctttgtagtgatgcctgtttttcaaaatttcactctacaaacaacctcaccatgaactgttgtgagaactgtgggagctattgctatagtagctctggtccttgccaatcccagaaggtttttagttcaacaagtgtcacggcatacaagcagaattctgcccaaattcctccatatgccctggggaagtcattgaggccctcagctgaaatgattgagactacaaatgattcaggaaaaacagagcttttctgctctattaattgcttatctgcttacagagttaagactgttacttcttcaggtgtccaggtttcatgtcatagttgtaaaacctcagcaatccctcagtatcacctagccatgtcaaatggaactatatacagcttctgcagctccagttgtgtggttgctttccagaatgtatttagcaagccaaaaggaacaaactcttcggcggtgcccctgtctcagggccaagtggttgtaagcccgccctcctccaggtcagcagtgtcaataggaggaggtaacacctctgccgtttcccccagctccatccgtggctctgctgcagccagcctccaacctcttgctgaacaatcccagcaagttgctttaacccatacagttgttaaactcaagtgtcagcactgtaaccatctatttgccacaaaaccagaacttcttttttacaagggtaaaatgtttctgttttgtggcaagaattgctctgatgaatacaagaagaaaaataaagttgtggcaatgtgtgactactgtaaactgcagaaaattataaaggagactgtgcgattctcaggggttgataagccattctgtagtgaagtttgcaaattcctctctgcccgtgactttggagaacgatggggaaactactgtaagatgtgcagctactgttcacagacatccccaaatttggtagaaaatcgattggagggcaagttagaagagttttgttgtgaagattgtatgtccaaatttacagttctgttttatcagatggccaagtgtgatggttgtaaacgacagggtaaactaagcgagtccataaagtggcgaggcaacattaaacatttctgtaacctattttgtgtcttggagttttgtcatcagcaaattatgaatgactgtcttccacaaaataaagtaaatatttctaaagcaaaaactgctgtgacggagctcccttctgcaaggacagatacaacaccagttataaccagtgtgatgtcattggcaaaaatacctgctaccttatctacagggaacactaacagtgttttaaaaggtgcagttactaaagaggcagcaaagatcattcaagatgaaagtacacaggaagatgctatgaaatttccatcttcccaatcttcccagccttccaggcttttaaagaacaaaggcatatcatgcaaacccgtcacacagaccaaggccacttcttgcaaaccacatacacagcacaaagaatgtcagacagatttacctatgcctaatgaaaaaaatgatgcagaacttgattctccaccttcaaagaaaaaaagattaggttttttccagacttatgatacagaatatttaaaagttggttttattatctgtcctggatcaaaagaaagttcaccaaggccacagtgtgtcatttgtggagagatcttatccagtgaaaacatgaagccagcaaatctttctcatcatttgaagacaaaacattcagaattagaaaacaaaccagtagatttttttgaacaaaaatctttagaaatggaatgtcaaaatagttctttaaaaaagtgtttactagttgaaaagtcacttgtgaaagcttcttatttaattgctttccaaactgctgcaagcaagaagccattctccattgctgaagaattaattaaaccatatttagtagaaatgtgttcagaagttttgggttcaagtgctggagacaaaatgaaaactattccactttctaatgttacaattcaacacaggattgatgaactatctgcagacattgaagaccagctgattcaaaaggtcagagagtcaaagtggtttgcccttcagatagatgagtcatcagaaatctcaaatatcacacttcttttgtgctatattcgtttcattgattatgattgtcgtgatgtaaaagaagaattattattttgcattgaaatgcctactcaaataactggctttgaaatatttgaactaataaataaatatattgatagtaaatctctgaattggaaacattgtgttggtctctgtaccgatggggctgcaagcatgactggcaggtattctggtttaaaagcaaaaattcaagaagttgccatgaatacagcggcatttacacattgttttattcaccgtgaacgtttagtggcagaaaagttgtctccatgtttacataaaattcttttgcagtcagcacaaattttaagttttataaagagcaatgcattaaattcacgtatgttaacaattttgtgtgaagagatgggatctgagcatgtgagtttaccgcttcatgctgaagtacgttggatatcaagagggagaatgttaaaaagattatttgaattacgacatgagattgaaatatttttaagtcaaaagcattcagatttggccaagtattttcatgatgaggaatgggttggaaagctggcctacttatcagatatattttcacttataaatgaattaaatttaagtctccaaggaactttgactactttcttcaatttgtgtaataaaattgatgtatttaagagaaagttaaaaatgtggttgaagcgcacacaagagaatgattatgacatgttcccttcattttctgaattctcaaattcatcaggcttaaatatgacagacatcacaaggattatttttgagcacctggaaggactttctcaagtgttcagtgactgttttccaccagaacaagacttgcgttcaggaaatttgtggataattcacccttttatgaatcaccaaaataataatctcaccgacttcgaagaagaaaagctaacagagctatcttcagatttaggattacaagcactatttaaatcagtgtctgtaactcagttttggataaatgcaaagacaagttacccagaactccatgaaagggcaatgaaatttttattacccttttcaactgtttatttatgtgatgctgccttttcagctttgactgagtcaaaacaaaaaaatctgttgggttctggccctgccctaagacttgcagtcacatctttaattccaaggatagaaaaattagtgaaggagaaagagtagcaatatgcacattgcttaacagtgaagtcaataatcctgtgttaagttttgtataagtatcctaaaagataatttcctaatgtggatttgtgttttcagtgattaaatgttttaataatttttccctttttgttgaggaatttaataattatgattgttataaataattatgtataattataatctagggtagaaaatttagttatttcattaaatttggactagtgacaaagactgcaggtaatgagaagcccagtttataatgtaacagcacaacctggatgttgaaacagcttggcctttagaagcaagtggaacatttcagtcttctagccaaccagctacttacccctgcaaggttgtgagtaggtggaaaagatagatcttttttttgagatggagttttgctcttgttgcccaggctggagtgcaatggcgtgatcttggctcactggaacctctgcctcctaggttcaaacaattctcctgcctcagccttccaagtagctggggttacaggcatgtgccaccatgcccgtctattgtattttttttagtagagacggggtttcaccatattggtcaggctggtctctatctcctgacctcaagtgatccacctgcctcggcctcccaaagtgctgggattacaagtgtgagccaacgtgcccagctggaaaaagatagatctaagcagcttgggtaactataaatggaagcagcagggggatttgagacccctgcttggggcctttctggcccaatataccagggcttagcaaactttttaaataaagagccagatagtaaatattttcagctttgcaggccatactgtcacaactactcaattctgcagttgcagtgcaaaagcagccatagacaatatgcagataagtgtggctgtttttaaataaaacttattcatgaacactgaaaaaaaaaaaaaaaaa

SEQ ID NO: 1292 - DNA, 1810 bp, Homo sapiens
aggaagccgaggtctgaattgcgcgtggtggccatggcggccagcggggctgtggaaccagggcccccgggggctgccgtcgccccgtcgcccgccccggccccgccgcctgcccctgatcacctgttccggcccatcagcgccgaggacgaggagcagcagcccaccgagatcgagtcgctatgcatgaactgttactgcaatggcatgacgcgcctcctgctcaccaagattcccttcttcagagaaataatagtgagctccttttcctgcgagcactgtggctggaacaacacggagatccagtcggcaggcaggatccaggaccagggagtgcgctacactttgtctgtcagggctctggaggacatgaacagagaagtggtgaagactgactctgctgccacaaggattcctgagctagattttgaaattcctgcctttagccagaaaggagctctgaccactgttgaaggattgatcacccgtgctatctctggcctggagcaggaccagcctgcacgaagggcaaacaaagatgctacagctgaaagaattgatgagttcattgtcaaactgaaggagctaaagcaagtagcctcccctttcactctgatcattgatgatccctcagggaacagttttgtggaaaacccacatgctcctcagaaagatgatgccctggtgatcacacactacaaccggacccgacagcaggaagagatgctggggcttcaagaagaagcaccagcagagaagccagaagaggaagatctcagaaatgaagtgctccagttcagcacaaactgcccagaatgcaatgcccccgctcagaccaacatgaagctagtacaaatccctcactttaaggaggttatcatcatggctaccaactgcgagaactgtgggcatcggaccaatgaggtgaaatctggaggagcagtagaacccttgggcaccaggatcaccctccacatcacagatgcctcagatatgaccagagacctcctcaagtctgagacttgcagtgtggaaatcccagagctagaatttgaactgggaatggcagtcctcgggggcaagttcaccacactggaagggctgctgaaagacatccgggaactggtgaccaaaaatcctttcacactgggcgacagttccaatcctggacagacggagagactacaggagtttagccagaagatggaccagatcatcgaaggtaacatgaaggcccactttattatggatgatccagcaggaaacagttacttgcagaatgtgtatgcgcctgaagatgatcctgagatgaaggtggagcgttacaagcgcacctttgaccaaaatgaggagctagggctcaatgacatgaagacagagggctatgaggcaggcctggctccgcaacggtagcagtgggtggctcaagggccagcctccagcgctgctctttctgtaggttatttattagtattggatgaaggcgaaggctgggagtgtctttcccaccagcccttgcccatggtggggaggacatctggtctgagtcagagatctgtgcacactttctaaacagcttgtgatgcaagtgtgagcctattgtgttacttgaccttattttggaagttttgaattggcctaggaggaaacccagaaatgaaccaggggtatgtcatcacttttttcatatcaagtcctcaccctccttccacataatgctctatcctctaaggttggaactctgaagttggagaaggtggaataaagttacacctggaaaaaaaaaaaaaaaaaaaaaaaaaaaaaaaaa

SEQ ID NO: 1293 - DNA, 3083 bp, Homo sapiens
gcggaggcgcggagctaagcggctcggattatcctgggcagaccagagacttgaccagctaaacacttccgtcggtccggggcgtggacggggccagatcagcctcctgctctcccgagtcagggccacggaaaggcacaaatccatccgtgcgactcctggtacccagaccgggaggttgtctagtcacgcgcggtctgtgttgggcgagagctgaggagccggcgtccctgccaacgactcggccccgggacggtcaggagcctggggccctggtcccgcacctgtcttcgggcggacgcatccctcacggtctctccgcagcccgcgggtcctgcccccgcaggcagcgcgcgaacgtgggcgtggggatggccaccagtttccggacagcttcgtgctggggattattgtcattcaaggatatatctatggagttcacctgggatgaatggcagctactggattctacacagaagtacctgtacagagatgtgatattggaaaactatcataacctgatatcagtggggtatcatggtaccaagcctgacttaatcttcaagttggaacaaggagaagatccatggataataaatgccaaaatttccaggcagagctgtccagatggctgggaagaatggtaccagaacaatcaagatgagcttgagagtattgaaagaagctatgcttgtagtgtgttgggaagacttaatctgagcaaaacccatgattcttcaagacagagactctataacacacgtggaaaaagtttgacacaaaactcagctccaagcagaagttatttaagaaagaatcctgataagtttcatggttatgaagaaccatattttcttaagcatcaaagagctcatagcatagaaaaaaactgtgtgtgtagtgaatgtgggaaagcttttcgttgtaagtcacagctcattgtacatctcagaattcatacaggagagagaccttatgaatgcagtaaatgtgaaagagccttcagtgccaagtcaaaccttaatgctcatcagagagttcatacaggagaaaaaccctactcatgtagtgagtgcgagaaggtcttctctttcaggtcacagctcattgtccatcaggaaattcacacaggagggaaaccctatggctgcagtgaatgtgggaaagcctacagttggaaatcacagcttcttttacaccagagaagtcacacaggagtgaaaccgtatgaatgcagcgaatgtgggaaagcctttagtttgaagtctccattcgttgtacaccagagaactcatacaggagtgaaaccccataaatgcagtgaatgtgggaaagcctttaggagtaagtcctatctccttgttcacatccgaatgcatacaggagaaaaaccctatcaatgcagtgattgtgggaaagccttcaatatgaagacacaactcattgtacatcagggagttcacacaggaaataatccttatcaatgcggtgaatgtgggaaagcctttggtaggaaggaacagctcactgcacatctgagagctcatgcaggagagaagccctatggatgcagtgaatgtgggaaggctttcagcagcaagtcataccttgttatacataggagaacacacaccggagagagaccctatgaatgtagtttgtgtgagagagccttttgtggaaaatcacagctgattatacatcagagaactcattcaactgagaagccctatgaatgcaatgaatgtgaaaaagcctaccctaggaaggcatcacttcagatacaccagaaaactcattcgggagagaaaccttttaaatgcagtgaatgtggaaaagccttcactcagaagtcatctctcagtgaacatcagagagttcacaccggagagaaaccatggaaatgctctgaatgtgggaaatccttctgttggaattcagggcttcgtatacatcggaagactcataaatgagaaatcagaatgatgcaatgtgagaaactgatgttcaggagacttcggataatatagacaggatttacaagcaggaggccctaaaattacactcatgtcaaaaatcagagaggagagagaccaaccatatttgggatgagtgtaaaagctttcagaaataagttacaaatctttgtagatgaaaataatggaaggaatgtggagcaataaatgtatcaaatgttgtagtatcatcatgaagattcagagaatttacactaggaacaccttataagttgaataaattaaggaagcattttcccattgaaagtgtgttccatggaaagtcacattccagatttgaagctgtgtttttgtaaaataaaatcttggtatgaacagttgacttcatggtggagtataaagttgtttttttaaaaatatgtaaataatgttcaggaaaaacgcagggaacagagtcttaaagttaatggatatttaatgtgactttcctgagttaacactgaatagtatttctaaaattttttgtactttattttttaatgtaacttgttctatctatctatatatatatttgatagtttgtggaataatatcccccagtattttccatattaaatgctaattatcttttgatttctttttcataagcagatctggcatttattacagggctgccgcttaagagaactcattataatgaacgtttattatattttgcagttccatgcctgttgtccattgattgacatgagcacccctgttttctctggagaaatacctcccctctctggggtgcttcctgtggtagtgtctttcaggtatccgttccactagctacaggtgagcattttacccattgttggataatggtaatctctttttcagaattttgagtctgtaattcatttgtacatgaaccagaaaatgtgggaactcattcattcttgtcccagaattctgttgagaacatccattcattctggctaattgattacaagaataactgtggatacgatccctttagaacctgcttctctgatctgtgtgtttcctcacttctcaataaaaatgtcttttgcttttaaaaaaaaaaaaaaaaaaaaaaaa

SEQ ID NO: 1294 - DNA, 5611 bp, Homo sapiens
attgaggggggcggacgccgagggggtgaacacgagtgggaagctaagagagacacggggagggggaggggaccgggaaccatttgaatgagaggaggggatcacgggtagagtgggctccaggaggtagggcgagcagggtgtgacgggggccagactcttgagccagtacatatccagccatactcatggaccccagtgatttccccagtccatttgacccattgaccctgccagagaagcccctggctggagacctaccagtagacatggaatttggagaggatctactggaatcccagactgccccaactcgaggatgggccccccctggcccttctccatcctcgggagccctggacctgcttgatacccctgctggcctggaaaaagaccctggagtcctggatggagccactgagttgctggggctgggggggctgctctataaagccccctctcccccggaggtggaccacggtcctgagggaaccctggcatgggatgcaggagatcagaccctagagcctggaccagggggccagacccctgaggtggtaccacctgatccaggggctggggcaaattcctgttcacctgaggggctactagagcctttggctccagattctccaataacactgcagtccccacatattgaagaggaggagaccacctccatagctactgcaagaaggggctcccctgggcaggaggaggagcttccccaagggcagccacagagcccaaatgccccgcctagcccttcagtgggagagactctgggggatggaatcaacagttctcagaccaaacctgggggctctagcccccctgcacatccttccttgccaggagatggcctgactgcgaaggcgagtgagaagccgcctgaacggaagagaagcgagcgcgttaggagagcagaacctccaaaacctgaggttgtagattccactgagagcattccagtgtcagatgaggattctgatgccatggtagatgaccccaatgatgaggactttgtgccattccggccccggcgctctcctcgcatgtccctacgctcaagtgtgtcacaaagggccgggcgctctgcagtgggcaccaagatgacttgtgcacattgccggacaccactgcagaaggggcagactgcctatcagcgcaaggggctgcctcagctcttctgctcgtcatcctgcctcaccactttctccaagaagccctcgggcaaaaagacctgtaccttctgcaagaaggagatctggaacaccaaggactcggttgtggcgcagactggttctggaggctccttccatgagttctgcacatccgtctgtctctccctgtatgaggcccagcagcagcgcccgatcccccagtctggggatcccgccgacgctactcgctgcagcatatgccagaagactggagaggtcctgcacgaggtcagcaatggcagcgtggtacaccggctctgcagcgattcttgcttctccaaattccgggccaacaagggactgaaaaccaactgttgtgaccagtgtggggcttacatctacaccaagaccgggagtcctggccctgagctcctcttccacgagggccaacaaaagcggttctgcaacacaacctgcttgggggcgtacaagaagaaaaacacacgtgtgtacccatgtgtctggtgcaagaccctgtgtaagaactttgagatgctatcacatgtggatcgtaatggcaagaccagcttgttctgttccctgtgctgtaccacttcttacaaagtgaagcaggcagggctcactggccctccccgaccctgcagcttctgccgccgcagcctctctgacccctgttactacaacaaggttgaccgcacagtctaccagttctgcagccccagctgctggaccaagttccagcgcacaagccctgaggggggcattcacctgagctgtcactactgtcacagcctcttcagtggcaagcctgaggtcttggactggcaggaccaagtgttccagttctgctgccgtgattgctgtgaggacttcaagcggcttcggggtgtggtgtcccagtgtgagcactgtcggcaggagaaactcttgcatgagaaactccgattcagcggagtggagaaaagcttctgcagcgaaggctgtgtgctgctgtacaaacaggacttcactaagaagctgggcttgtgctgtatcacttgtacttactgctcccagacctgccagcgcggagtcaccgagcaactggatggcagcacctgggacttctgcagtgaggactgtaagagcaagtacctgctgtggtactgcaaggctgcccggtgccatgcgtgtaagcgccaggggaagctgctggagaccatccactggcgtgggcagatccgtcatttctgcaaccagcagtgtcttctgcgtttctatagccagcagaaccaacccaacctggatacccagagtgggcccgagagcctcctgaacagtcagtctcctgagtcaaaaccccagacaccctctcaaaccaaagtggagaacagcaacacagtgaggaccccagaggaaaatgggaatttgggcaagatccctgtgaagacccgatcagctcccactgctcccacccctccacccccaccacccccagcaacaccccgcaaaaacaaggctgccatgtgtaagccactgatgcagaatcggggcgtctcctgcaaggtggagatgaagtccaaaggaagtcaaacagaagagtggaagccacaggtgatcgtgctgcccatcccagtgcccatcttcgtgccagtgcctatgcatctgtactgccagaaagtcccggtgcctttctcgatgcctatcccggtgcctgtgcccatgttcttgcccactaccttggagagcacagacaagattgtagagaccattgaggagctgaaggtgaagatcccttccaaccccttggaggccgacatcctggctatggcagaaatgattgcagaggctgaggagttagacaaggcctcatctgacctttgtgatcttgtgagcaaccagagtgcagagggactcctggaagactgtgacctgtttgggcctgctcgagatgatgtcctggccatggcagtcaagatggccaatgtcttggatgagcctgggcaagacttggaggcagacttccctaagaatcctctggacattaatcccagtgtagacttcctctttgattgtggcctggtagggcctgaggatgtgtctactgaacaagaccttccccgaaccatgaggaagggtcaaaagcggctggtgctttccgaaagctgctcccgggactccatgagcagtcagcctagttgtaccgggctcaactattcatatggtgtcaatgcttggaagtgctgggtgcagtcaaaatatgccaatggagaaaccagcaagggtgatgagctgcgctttggccccaaacccatgcgtatcaaagaggatattctcgcctgctcagctgctgagctcaactacggtctggcccagtttgtgagagaaatcactcggcccaatggtgaacgatatgaacctgacagtatctactatttgtgtcttggcatccagcagtacttgctggaaaataaccggatggtgaacattttcacggacctttactacctgacttttgttcaagaactcaacaagtctctgagtacctggcagcccacactcctccccaacaatacggtgttctctcgagtggaggaggagcacctctgggagtgtaagcaactgggggtctactcgccctttgtcctcctcaacaccctcatgttcttcaacactaagttttttgggctgcagacagctgaggaacacatgcaactctccttcaccaatgtggtgcggcagtcccgcaagtgtaccacccctcggggcaccaccaaggtggtgagcatccgctactatgccccagtccgccagaggaaagggcgagacacgggtcctggaaaacggaagagagaagatgaagcccctatcttagagcagcgtgagaaccgcatgaatcccctccgctgccctgtcaagttctatgaattctatctctcaaaatgtcctgaaagcctccggactcgcaacgatgtgttctacctgcaacctgaacggtcctgcatcgccgagtcacctctctggtattctgtgatccccatggaccgcagcatgttggagagcatgctcaatcgcatcctggctgtgcgcgagatttatgaggaactgggtcgtcctggggaggaagacctggactgagctcgtgtgccatccatatccatctttcacatcaatgtctgtcctgtggccatgtccctcagggtgacaggcccaggaaccaatgctactcattctgaagggccctgactgctcctttccgctcacccattccctgccttctctaggaaccctggcttttatcttcttccgtaccacttgacaaccatggggccctggtcttctgtactcaggggctggtctcccagtgatgggcaaaagccagcttgcccgttttctttatgcttcagagtaaacccctccttctgggtccagactctgggtggagtgttaatagctctggtgatcctgttggctttgggtttcctgacccatcccgcataggtagagcctcttgttcctaggcatgacctagggaaaaacccagctgccttctctgccctgtgcccactcccttctctactcttccccagcaccatgccaaaaggtcttatctgaaaggtaagaaataaacaatgaaagcgatgaggggaccatttacataaaacacagagcttagacactcttcccctcctatgaaataattggttgttggcaccatctcaccaccgcatatccctcaccccctcggcaagcaccaatccttggtgctgccgtttttaaaatcttccaaatgcctttttttcctcagaggcagagaatgactaagtacggggagcagactcctgttgtgcagactcctgtccccttggtttctgtgtttgtctctctgccatcttaggttgccatgagccatggtgtcaacatgcttagccccctctgtaactgcctccctttagttcaatggacagacctcccaaggcaaaaactaccttctgacttgggttgaggctgggttcccctctattgttcccctatcataagagctaggccaagcctatgggaccttgagtcatgcaggatgggatctgtggtcaaaggacaggcgaggagctgtgggcgcagggcctgccgccactgcctacatcttctctcttccccatcttgcattggaggtcccagaaaacaattagcttctggcaaagggggtacccacttctttccctgttgactttgctgtttcccaggctcctttttgtgtttttataactgtcaccagttagccactgtttaaattgtatatattgttctgaggcgcctggcctgtcccttcagtgagccatgcccacccttgtgttgtagtgagaagctgttgtcacgactaaccttctgtctctgaaattgtttgtttcaaataaagagttaaaattgtcaaaaaaaaaaaaaaaaaa

SEQ ID NO: 1295 - DNA, 7011 bp, Homo sapiens
agtgtgggcgggggccggggggccgagaggtaccgccgccaccgcgcggggagccgcagcggttccgagcggggcccaacatggcggagagagaggtggagtccggcccccgaaagaggtttgaacaaaaaagtggtgcagtttttgatgaaattgtagagaactgtggtggtatcatggatacagaaatgtctgaagatatagaccacaacttaactcctacccttgacagcatgtcttatggaatgccgaatcaaacaggatctgaaaattcattgctggatgaagatgattattttttgaactctggggatcttgcaggaattccagtcgttggtagtgacaatgaggatgaacaggattttagttcaaaggacaatcttgtttcttcaattcatactgatgatagcttggaagtagagagaagagtcacacagcatgaatcagacaatgaaaatgaaatacaaattcaaaataagttaaaaaaagactttcctaaacaatttgatcaggtttctgtctttaaatcaatacggaaagattttagtctagtaagagaaaacagcaaagagacattttctggaaaggagaaaaatagagacctaacttatgaacgtgaaaaacggttggataaaccccataaagatttggattcaaggttgaaaagcagtttttttgataaagcagctaatcaagttgaagaaacattacatacccatttaccacaaaccccagaaacaaactttagggattccagctacccatttgccaataaagaatccattggttcggaactggggaattcctttgcatcaaatattagaattaaagaagaacctttggatgatgagtatgacaaagcaatggcaccacagcagggactactagacaaaataaaagatgaacctgacaatgctcaagagtatagtcatggccaacagcaaaaaactcaagagggggaactgaaaattagtgctgtgttttcagtcagtggcagccctcttgctccacagttgactactggctttcagccctcactggcgtcatctggcatgaataaaatgcttccttcagttccagccacagctgttcgagtttcctgttctggttgtaaaaaaatcctccagaaggggcaaactgcttatcagaggaaagggtctactcagctattctgctccacactgtgcctcactggatatacagttccacctgcccgcccaccgcctcctctcaccaagaaaacttgttcaagttgctcaaaagacattttaaatccaaaggatgtgatcagtgcccagtttgaaaacaccaccactagtaaagatttttgcagtcagtcatgtttgtcaacatatgaactgaaaaaaaaacctattgttaccataaatacaaatagtatttcaaccaaatgcagcatgtgtcagaagaatgctgttattcgacatgaagttaattaccagaatgtggtccataaactttgcagtgatgcctgcttctctaagtttcgttctgctaacaacctcaccatgaactgttgtgagaactgtgggggttactgttacagtgggtcgggacaatgccacatgcttcagatagagggacagtctaagaagttttgtagttcatcgtgtatcacggcatacaagcagaaatcagccaaaattacaccgtgtgcgctttgcaaatcattgagatcctcagcagaaatgattgaaaataccaatagcttggggaagacagagcttttctgttctgttaattgcttatctgcttacagagttaaaatggttacttctgcaggtgtacaagttcagtgtaacagttgtaaaacctcagcaattcctcagtatcacctagccatgtcagatggaagtatacgcaacttctgcagctacagctgtgtggtagctttccagaatttattcaacaaaccaactggaatgaattcttcagtagtgcccttgtctcagggccaagtaattgtaagcatccccacaggttccacagtgtcagccggaggaggtagcacatctgctgtttctcccacctccatcagtagctctgctgcagctggtctccagcgtctcgctgcccagtcccagcatgttgggtttgcacgaagtgttgtgaaactcaaatgtcaacactgtaaccgtctttttgccacaaaaccagaacttcttgactataagggcaaaatgtttcagttctgtggcaagaattgttctgatgaatataagaaaataaataatgtaatggcaatgtgtgaatattgtaaaattgagaaaattgtaaaggagactgttcggttctcaggtgctgacaagtcattctgtagtgaaggttgcaaattgctttataaacatgacttggcaaaacgctggggaaatcactgtaaaatgtgcagttattgtttacagacatctcccaaattggtacagaataatttaggagggaaagtggaagagttctgttgtgaagaatgcatgtccaaatatacagttttgttctatcagatggccaaatgtgatgcttgtaagcgacagggtaaactcagtgagtccttgaaatggcgaggggaaatgaaacatttctgtaacctgctttgtatcttgatgttctgtaatcagcaaagtgtatgtgacccgccttcacaaaataatgcagcaaatatttccatggttcaagctgcttcagcaggacccccatctctgagaaaagattcgactccagttatagccaatgtagtatcattggcaagtgcccctgctgctcagcctacagtgaattctaacagtgtcttacaaggtgcagttccaacagtaacagcgaaaatcatcggtgatgcaagtactcaaacagatgccctgaaactgccaccttcccaacctccaaggcttttgaagaacaaagctttattatgcaaacccatcacacagactaaagccacctcttgcaaaccacatacccaaaacaaagaatgccagacagaagacactccaagtcagccccagattattgtggtgccagttcccgtaccagtgtttgttcccatacctcttcacctttatactcaatatgctccagtcccatttggaattccagttccaatgcctgtccctatgcttattccatcttcaatggatagtgaagataaagtcacagagagtattgaagacattaaagaaaagcttcccacacatccatttgaagctgatctccttgagatggcagaaatgattgcagaagatgaagagaagaagactctatctcagggagagtcccaaacttctgaacacgaactctttctagacaccaagatatttgaaaaagaccaaggaagtacatacagtggtgatcttgaatcagaggcagtatctactccacatagctgggaggaagagctgaatcactatgccttaaagtcaaatgctgtgcaagaggctgattcagaattgaagcagttctcaaaaggggaaactgaacaggacctggaagcagattttccatcagactcctttgacccacttaataaaggacagggaatccaggcacgttcccgaacaagacgacgacacagagatggcttcccccaacccagacgaagaggacggaagaagtctatagtggctgtggagcccaggagtcttattcaaggagcctttcaaggctgctcagtgtccgggatgacactgaaatacatgtatggggtaaatgcttggaagaactgggttcagtggaaaaatgccaaggaagagcagggggatctaaaatgtggaggggttgaacaggcctcatctagcccacgttctgaccccttaggaagtactcaagaccatgcactctctcaagaatcctcagagccaggctgtagagtccgctctatcaagctgaaggaagacattctgtcctgcacttttgctgagttgagtttgggcttatgccagtttatccaagaggtgcggagaccaaatggtgaaaaatatgatccagacagtatcttatacttgtgccttggaattcaacagtacctgtttgaaaatggtagaatagataacatttttactgagccctattccagatttatgattgaacttaccaaactcttgaaaatatgggaacctacaatacttcctaatggttacatgttctctcgcattgaggaagagcatttgtgggagtgcaaacagctgggcgcttactcaccaatcgtccttttaaacaccctccttttcttcaataccaaatacttccaactaaagaatgttactgagcacttgaagctttcctttgcccatgtgatgagacggaccaggactctgaagtacagtaccaagatgacatatctgaggttcttcccacctttacagaagcaggagtcagaaccagataaactgactgttggcaagaggaaacgaaatgaagatgatgaggttccagtgggggtggagatggcagagaatactgacaatccactaagatgcccagtccgactttatgagttttacctgtcaaaatgttctgaaagtgtgaagcaaaggaatgatgtgttttaccttcaacctgagcgctcctgtgtcccgaatagccccatgtggtactccacattcccgatagaccctggaaccctggacaccatgttaacacgtattctcatggtgagggaggtacatgaagaacttgccaaagccaaatctgaagactctgatgttgaattatcagattaaaacggaagtgaggttcttattttcatacatattggtatgcaccaaactgtgaatgcatccagctgttggaaaatgatgtataagtctaagtcctcttgacttgaccataagatcatggaaaacagatgacttgtgaaccccacagtgtggatgtgcaaatgaaaattgaaggaaagaatatgaactgagaaatgttctttggcagtgatatagttcttagacatcttcagaatgactaatttctccgagtggtgcataatcttattttgtttgggagtaacaaatcgtggaatatttttaaggaaaactgttgtataaaactttaccatagtaaccttagaccttagagaggtagctttggagtgaaactttggctgcaataggctactttggcaagccctccgtaaaagtcagaggagagatcagtacagagctaagagtgacatcaaatgaggactgtgggacccagatttgaagacccaataaaaatactcaactttttaaaaaagatagtgaagtggtcttgattgattttgattttcactgccaagccaatcatgtgaaggacagaagcttttgccatgggcccctcacatcagggaaaatgaccttcactgctgttaacagtaatgtgtccctttcattttctggatcaagccttctcagcggtgggtctggatgtgggtaaactaaggtaaaggggatgatattccacaaactaattatgcacacagaaaatctgtggagcctatcagaccccaagtgtcttgaaatgtttgtagaaacccactaaaatgccccttctctgggtgtgggcccttattgcagctgtctcacagcctgagctgtggtacagagaaatgggggttctccttttattttcattttttttccccaatggcagcttttctcccgttgttttaccttcctatttcccaaacagttcctcttattttgtcttttgcaccagtttctggaggcccttgtcatttcaaaaaggatagtctcttttcttactctggcaaacctgtgagtgattccacaaagatacagtattacttagctatctgaattatgatagaaaaggtcctagttaggttcctatataaagcatttggaagatgaccttgttgcccttgaaacttgaaaatagggattctggggtgaggatacaaagacattgtcttgcatatccataagcaggtcttagagcattattccaaactctagctgtttcagtagttctatgaggattgcaagtcataggtgtgtgtggcatatcagtccatctccctcatctccattctcagtttcttccccacaaaatttggaatcaaagcttttatgacgtttgccaattgcagaacttcttcagctaaggttaatttgacgctatgataaaactgagagatgtcaaaaagcctcttagaaattttaatcttgaaagacttttcagggtatctcattttttaggtgggggtggcaggtgtatttcttttttaacaaataaaaggcatttaagtaaaactaaaatgaaaaaagtaggccttctgacattgtgtacttggtggttctgtccctctgcctgtaacaaatctcatttttgttaccaagaactgtatgaaagaagtaaatccaccccgattctgtatgattaattccatctgtgtttgtcatttctgactggaaaacttcttactccataccttgttcgatatggaggacaaataattggattgtctgataagtctgccaataaactatccagaaatagcaagtgtaatagtccccactatacgaattttatggtttgtataaacactaacattttccccttctgtagttgtatgaaaaaacaaatattgttagcatagtagataaattgttatgaaataccagaaaaaaaaatctgtatcttttactgagaacacccaatacccagataaatgactgtatcaggatttcatttgcatgttagtccacagagttgcccagaaccctaaatttattcataagagaaaatattgattaattattggtcattcctcataagtgtagctgttgatgtgtgcgtctgattattgcttttttaattttatgaaaattgtgtaaaattacattttttttccaggggagaaaaaaacatcaaacaaaaacatctaaatcatcctttttgttctttttcagtttttaaccacttttaggttttccccttacagaaaccacagaaatattcccttagaataaaatagtatatttgtatttgaaaaaaaaaaaaaaaaaa

SEQ ID NO: 1296 - DNA, 3305 bp, Homo sapiens
gcctaacttgcgcgctgagatttccggcgtgggagcagaggtctgagtcttgcgtgggtcctctatatagggtgagaagcgtggcgctcggttcctgcctcggggaagtcctggcgcagatgggccacggggccggcgtggcggcgcctgggaccgactgaggcctaggcgccggagccggccgcgcctgggctggagcggggctcctcggcctggactgggagcccccggccccgggctcctgctggcgccgtccaaccttacatgggttcagggcgccttcgtaggcgggcacggctggtttcgggctaaggcgctctggagacctgacgatggcgtcgggcccgggctcccaggaacgggaagggctcctgatagtgaagctggaggaggactgcgcctggagccaggagctgcccccacctgacccaggaccgagccccgaggcctcccacttgcgcttcagacggttccgcttccaagaggcagctggtccccgggaagccctcagccggctccaagagctttgccatgggtggcttcggcctgagatgcgcacgaaggagcagatcttggagctgctggtgttagagcagttcctgaccatcctgccccaggagatccagagcagggtgcaggagctgcatccggagagcggcgaagaagcggtgacccttgtggaggatatgcagagagagcttgggagactgagacaacaggtcacaaaccatgggcggggaacagaagtgcttttggaggagcctttgcctctggaaacagcacgagagtcaccgagcttcaagctggagccaatggagactgagcgaagccctggccccaggctgcaggagctgctaggccccagcccccaaagggacccccaggctgtaaaggagagggcattatctgctccctggctttctctttttcctcctgaagggaacatggaagacaaggagatgactgggccccagttgcctgagagcttagaggacgtggcaatgtacatctcccaggaggagtgggggcatcaggatcctagtaagagggccctctccagggacacggtgcaggagagttatgagaatgtggactcactggagtctcacattcccagtcaggaggtcccaggcacccaggtgggacaaggaggaaagctatgggatcccagtgtccagagctgcaaggagggcctgagccccagaggcccagctccaggagaagagaaatttgagaacctggaaggtgttccgtctgtatgctctgagaacatccaccctcaggtgctgcttcctgaccaggcccgaggggaggtgccctggagtcctgagctgggaagacctcatgaccggtcgcaaggggattgggcgcctcccccagagggtggaatggagcaggccttggcaggagcctcaagtggcagagaactggggcgaccgaaggaactgcagccaaagaaactccatttatgtcccttgtgtggcaaaaatttctctaacaactcaaacctaattaggcaccagagaatacatgcagctgaaagactgtgtatgggtgtggactgcactgaaatctttggtgggaacccacgtttcctgtcactacacagagcacacctgggagaggaggcccacaagtgccttgaatgtgggaaatgcttcagtcagaacacccatctgactcgccaccaacgcacccacacgggtgagaagccctatcagtgcaacatttgcggaaaatgtttctcctgcaactccaacctccacaggcaccagagaacgcacactggggagaagccctacaagtgccctgagtgtggggagatctttgctcacagttccaacctccttcggcaccagagaattcacactggagagcgaccttataagtgtcccgagtgtgggaaaagtttctctcggagttcacacctcgtcattcacgaaagaactcatgagagagagagactttaccccttctctgagtgtggggaagctgtgagtgacagcaccccctttcttacaaaccatggagcccataaggcagagaagaagctctttgaatgtttgacttgtgggaaaagcttccggcagggcatgcacctcaccagacatcagagaacacacacaggagagaaaccgtataaatgtaccctttgtggggaaaacttctctcatagatccaatttaatcaggcaccagagaatccacacaggagaaaaaccctatacctgtcatgagtgcggagacagcttctctcacagctccaatcggattcgccacctgagaacgcatacgggagagagaccctataaatgttctgaatgtggagaaagcttctctcggagttcccgtcttatgagtcatcagagaactcacacaggttagtaacagtggggtttctctttgccccaggtgaggtggcatattcagaggagcctgttggcaagagctggtattccctgcccagccgaccaaatgacctctgcattcttcaggtaatgggggctcattgtgagggaggtgcagaggcagcagaggattggcataaaactgaaaaggagttctgtctgcatgagaaaggatggcaagtctctgaggtgacctcagggtggaattctctgttaagtccaccctgccccagggtgctcctaccctcttggtctttttaaagccaaggtgcgatttgggcacctgactgtccagtttaccttaacaagtttgggaatccatgtgatgtttttgatacttcttcctcatttgggacattcagtaggagcatttgggcttccggggcccctgagaccaaagaagaggggccaagtaccctgggaaatcagctgaaggtcaacaaaagactggttgtgagttgcagctgtcccgaaggccccagttgggaagccatgggcagtccagatcaagccaccacgtgccctacgatggcctaacaggagtgcccattggcagattacacatgtaaatatgacctcagacaaaaaggaaccagaggcccaagggcaataataaggtggaatttgcaggtcagcccaggaattggcagaggaagtaggtgtctgataaccctttgtggagaatgagattccccccacctgtgtgagaaaaataaacagctctggagtcttgttcctgactccagaggaacgagagcattccaggaaagagagattccctggaaaattgaaaatgtgaatcctagggggaaattggggattgtgtctttccctgttgaaaatgtttggatgggaataaatatcttcaggaaacataaaaaaaaaaaaaaaaaaaaaa

SEQ ID NO: 1297 - DNA, 12172 bp, Homo sapiens
attttcttctgcacttctgtctggagaggtctgtagccactgagggccccggtcggggccgctttgcaggtccctagtcaggaccgagcaggggagtaggataggaatccccgccgcacctttgtacgagcctgaccccttccgtgggtttgttcctgggtcgccgtcaagctgcggtctctcctcccccgcccttcagccccgcggtctccaggggcggcgccctgggtctggaacgcggttgccaccgaggaggcggcggccctgcgtctggaacgccgttgccaccgaggaggcggcggccccgagcgcgcctggaagccccgggcaaccggccagggtcgggcacaggtggggtccgtcaggccgcccggggctcctctgtcccagctctgcggcccagggggtgacgtgatggcggcagcggtgctgacggaccgggcccaggtgtctgtgacctttgatgatgtggctgtgactttcaccaaggaggagtgggggcagctggacctagctcagcggaccctgtaccaggaggtgatgctggaaaactgtgggctcctggtgtctctggggtgtcctgttcccaaagctgagctgatctgccacctagagcatgggcaggagccatggaccaggaaggaagacctctcccaagacacctgtccaggcgacaaaggaaaacctaagaccacagaacctaccacttgtgagccagccttgtcagagggaatctcacttcagggacaagtgacacaaggaaactcagtggactcacagttggggcaagccgaggatcaggatgggctatcagaaatgcaggaaggacacttcagaccaggaatagatccccaggagaagtctcctgggaagatgagccctgaatgtgatggtttagggacagctgatggtgtgtgttcaaggattggacaggagcaagtctctccaggagatagagtccgtagccataactcatgtgagtcaggtaaagatcccatgattcaggaagaggaaaataactttaaatgcagtgaatgtggaaaagtatttaacaagaaacacctccttgctggacatgagaaaattcactctggagttaagccctatgaatgcacagaatgtgggaaaacctttattaagagcacacatctcctgcaacatcacatgatccacactggggagaggccctatgagtgcatggagtgtggaaaggccttcaaccgcaagtcataccttacccagcaccagcggattcacagtggagagaagccttacaagtgcaatgaatgcggaaaggccttcacccaccgctccaattttgtcttgcataacaggagacacactggagaaaaatcctttgtgtgcacagaatgtggccaagtctttcgacataggccaggctttctccggcactatgttgtccacagtggtgagaatccctatgagtgcttggagtgtggcaaggtcttcaaacacaggtcatatctcatgtggcaccagcagactcataccggggagaagccctatgagtgcagtgaatgtgggaaggtcttcttggagagtgcagccctgattcaccactatgtcatccacactggagagaagccctttgagtgcctcgagtgtgggaaggctttcaaccaccgatcctacctcaagaggcaccagcggattcacactggggagaagcccttcgtgtgcagtgaatgtggaaaggccttcacccactgctctacttttatcttgcataaaagggcccacactggagaaaagcctttcgagtgcaaagagtgtgggaaagcctttagcaatcggaaggacctcattcgccacttcagcatccacactggagagaagccctatgagtgcgtggagtgtggaaaggccttcacccgcatgtcgggcctcacgaggcacaagcggattcatagtggagagaagccctatgaatgtgttgagtgtgggaaatcgttttgctggagcacaaacctcattcgacatgccattatccacactggagagaagccctataaatgtagtgaatgtggaaaggccttcagtcgcagctcgtccctcactcagcatcaaaggatgcatactgggaaaaatcccatcagtgtaacagatgtgggaagaccttttacaagtggacaaacctcagttacccttcgagaacttcttttagggaaggactttttgaatgtaaccactgaggcaaatattttgccagaggaaacatcttcctctgcatctgatcaaccataccaaagagaaaccccacaagtgtcttcactgtgagaaaaccttctgttgctgaatattacttgtcatctgaagagtcatattagaaattcgttcagtctagagccttattctccatctgataatttatcctggagagagacccagtggttattgtgcacataggagaaccttcagctgcatctttctccttagtttacagtgcaattttatctcaggaattatttttaaaaggaggaggggacatagaaaaaatgaaatgcaagcacacatcttttcaggcttctctgccaagcctatggcgctttgtcatggatttcttagtgtatttgggggaagggaaatgtttcaaggtaaagaaccttgaccctttatgtgcttgtatgtacatttattgctatccagtgtcagaacagttagtttaggaaaagtatgcaaactttaatcgcacatcttctgtattccacaatagtacttactcttgagaagcataactttatgacaacttagggggcttgagccatgaaatactcacgtttaagtcagtaaggatacacatgttaacattcaggcttttgtcttgatgcccgtcttttggtttacgtcatcattgtagccatatggtaaatttttatttgttaaatttttaaaaattacttagctcaaaatgtcagtggtaaatttttaaattgagtaaagtgattcttctttgctcttatttaaaatcgacagcatttctagttcctttgacattccatataatttttaggattagtttgtacttatttacaaaacagtcttgttcagatttttacagaaattgagttaagtctgtggattaatctgttaagaattggtatctttactatgttgggtcttgtagttcatgagtgcaggagtaggcctcttaatttataatagttaagcattccttaaagtatttcattaatgttaaaaattttcagcgtatagatccctatgcatttttgttagaatttgcatcctagggtgcttttttgtttgtgtgtgtgtgtaatttgagtgattgtaaatggcattgatgtttgaactttgaattgcacacaatttttggtagtatacagaaatataatatttttggacattgttttgctaccctgcaaccttattgagttcacttattatttttagctatttctttcgacagaatccttggaattttctatatagaaatgtcatctgcaaatacagaccattttttatctttcatcttacctgtaatataccttttatttcctttttgtttgtcttattgcattgcacaagctgggacttccattatagcgttgaataggaatagtgagaaaggccatccttacctggttcctgatagtaggggggacaatgttcagttttttgtttttttgttttttgtttgagacagggtctcgctctgtcacccaggctggagtgcagtggcacgatcttgtctcaccatagccttaagttcctgggctcaagtgatccccccacctcagccctcaccaccccccagtagctggtactacaagcatgcaccaccagtcccagctaatttttgtattttttggtagagacagggtttcaccatggtgcccaggctggtcttgaactcctgggctcaagcaacctgcttgcctgggtctcccaaagtgctgggattacaggcgtgagccacagtgcacagcatgttcagtttttcatcatgaagtataatgtaagttttataaaacatatgtcctctataagggtaaaaaatttcctctgttcccagttttctgagactctgtgttgctatgaataagtgtggaattttgttcagtactttttctccaccagttgatgtcattatgctattttccttctacatcctattgatggaatgtattgctttgatcaagttttgaatattgagccagccttgcatccttagaataaaccatacttgtttgtagagtataattgtttttatatatcatttgacatcattccctttgtttgtattttgttgaggaaatattcctctaatttattggctaataatgtgtagttcttttttcttttgtttcttatgttctaaatgtcttatgtgtggttttgatgtctaggtgatcttgacctttcaacatgaattggaaggagttctcttctaatttttggaagactgtgtagaattggtgttatttgttcttgtcatgtttgatgacctctagtcaaccattgggccagagatttttcttctggaggcttttaaattacatatttattttattggataggtagaactattcgaagtatctatttcttgtgtaataaattttgatagtctgtcctgttgaaggaatatttcatctgtatttgtagcactcccttattcttttgatagcaggatctgcacttctttttatttttaatatttaaaatgtgcatactcattttatgattgagtcttcttagacatttatcagttttattgcgcatcatgctgaaagatgtaatttttgcttcatctctcacttcagagaactagcactttatattaatgatttgtctctattcttgatttctttgatttctgctctgatcggtattatattccacttgctttggttgtatttggctctttctaacttttcaaggtggggttttagattattgatttgagatttttttgcttttttaatgtaagcattacattgtataaatttacctcatatcactattggtttgatcccacaagttttaatgttttcattacattttaattctaatagtttttattttttgagacattctctcttagccatgaattatttaatagtatgcttaattttctggtgtttggcatatttgttactgatttctaatttgttccatgtttgatctgactgtttaaatgtgttaacatttttttatgacccaggatagggtctatcttgtttcgtatagctgcttgaaaagaatgggtgttctgctgttactgggtggagtttctataaatgtctctatgatcctgctcattgttattcaagtcagctatgtccttgctgattttctgtccagcatttctgtcagttgctgagaggggtgttgaagtcctgaacataggccgggtgcagtggctcacgcctgtaatcctagcactttgagaccactaaggcaggtggatcacctgaggccaggagttcgagaccagcctggccaacatggcaaaaccctgtctactaaaaatacaaaaattagccaggcatggtggcgtgtgcctgtaatcccagctgctggggggctgaggcaggaggatcagttgaacgtgggaggcagaggttgcagtgagctgagatctcaccactgcactccagcctgggcaacagagcgagactctgtctcaacaacaacaacaaaaagtcctgaacatgattgtggaagtgtgttgctctttcaagttctatcactttttgtttgcaaagttcaaagctgtattgtttggtacatatacatgtaggtttgccaagtctttgtggtgaattgactcttctgtcattatgtgatgtcatttttttgccttttaatagtcttgtcaatactttacctgatgttctcatagtgactcctgcatattttgattaatgtttgcatggttaatatttcttcattttattttaaagcttacctgtatcattacttatgaagtcagtttctttgaacagcatatactcaggccatgctttttttattcattctgcatatgtctctcttaattggtatgttgaaatgatttacattaaaataattattgatattttagggcttaagtgtgcccttaaatgatttttgtgttcttttttattgttcctctgttatttggggttgtttactagtcttcctataggttacttcaccttttttttttttaataatttgatttgatacatatgtagtgttttttagtatagatcctccttgacttatgatggggttatgtcacaataaacccattgcaagttgaaaatactatgtcaaatatgcatttaatacacctaccctgctgaacatcatagccgatcttgccttcagaatgctcagaaaatttacattagcctgcagttgggcaaaatcatctaacacaaggcctactttataataaagttactgcaaagaattttaaataaaaattcaagtgtggtttctactgaatgcatgtcgcattcgcaccattgtaaagtcaagtagtaagtcgaaccatcctaagtcagggactgtctgtatatatctgcattttttagtgattgttctactattacagtgtaaatatataacttatgacagtttaataagttatcagcaatttagcactttacttccattaggttcctttagcttacctactaatgtaactatcttaagtaatagtaattcctcttcaaaaattgagcgctatgttgcaagatgtaatttttcttttccttttttttgagaccaagtctcactctgtcacccacgctggagtgctgtgatgcgatctcggctctctgcaacctctgcctcccgggttcaagcaattaactgcctcagcttccctagtaatggattacaggcgcccgccaccacgcctggctaatttttgtatttttagtagagacggggtttcaccatcttggccaggttggtcttgaactcttgacctcatgatccacccgcctcggccccccaaagtgctggggttacaggtgtgagccactgcacccggccacaagatgtaatttttactttatctctcacacgtattttacaaaacgtcatgagaaacattgtctcttgaccttttttttttttttttttttttaaagagacagagtctcactctgtcacccaggctggagtgcagtggcacgatcttggctcactgcaacctccgcctcctgggttcaagcgattctcctgcctcagcctcctgagtagctgggattacaggtgtgcgccgccacacccagctaattttgtatttttagtagagacggggtttcaccatgttgctcaggctggtctcaaactcctgaccttgtgatccgccaaccttggcctgtcgacctctttacccattccattgttcattcttctttcttgaaatcccaaaccttctattaacatttcttttcagttatacactgaactttactgtagcctttcttctagagtaacaaatgttctttgttttccttcctctaaagatgtctttatgtttccttcattcccaaagaatatttttgtggaatataagattcagagttggcagttgttttcttttagacttcagagatgtatctctctgttctgtacattattgtttaatataagaaacctactagcattcaaataatcattccctattttacaatgcatcagttctgtcaagcttcattcaaagtgtttttcattgtctctagtgttcagaagtttggctgtgatgtgcgtggcatggaagtttttgggtgtattctatttggcgctccctggtgcttgcccagctttttgatctgtaggattatgccttttgcaaaatttggggaactttcaactattatttcttcaaatattttttcaccccccagtcttgtcttttttagggacttcaataacatgagtggcagatcttgttttacactcccatgggtccttcaggctctcatcttttttctttttccagtctattttctgtcttgttaatattgattaatttttattgaccttccatggtcctcactgattgttttctttgtcatacctaatctgttgagtttgtgcagtgagttttcattttggttttgtattttccagttgtttaatttccattgggtgggttcttttgtacaccttctgtttctttgcttattttttaacgccaaagaaagactctcagagaatagacaactatattccaaagtcatggttctctggtggtttgtcttgacatttgaatagaaatgttaaactatctgggggaatagaaagcccacagtcttctgagttgtgctacaccaatatttctatgaacagatcttacaactgagagtgatctgcagatttttcagagtcatgttctccatggaatgtttgtaaaattccctagctctctgcactgagctgagatcgtgccactgcactccagcctgggcaacagagcgagactccatctcaaaaaaaaaaaaaattctctagctctctatgccttgttgtatcctcaggaaggagtcacctctcttccaggatcactcttgccttttgttattggacacattttcctacctcctgcccagtcttttttaggctctctgtcatacttcctcgcctagtctttaacttgtctctgataaccagatttttcccccataatctgtatctgtattcaagtctctatcctcatccccaaatggatttcaccccgcttgtccatcagtctctgcccatttcttctgtctcccacagacatggtctgtgtagttgttctgcacactacccgtcctcgccccttctcatttccctcactccacggacagctacaggagggcttccatcatttgtcctcttacttccttgttagaactttgtgctgctgaccaccactctgaaccaaaacttctttcttggttcttgaaagttgctgtctttctcctccagagggtctgtgtcttccttccaactcttaaacatttttgtttcccagaatccatcattggccattgctttttcacttgccatgagctctgtgaatgagatggttcctgctgaagacatttactttcaatgatctacagaatttcccaaatctatgtctccagactggatgtttctcacgtctgtggcccactgggcatcttctgcactttctctgcatttgtaaacactgagcctgtatgcgtgtctatgtggccatggccctggccgtggggatgcacccataattataatgagagcaggtgaatgtcatgtggctatgtatgagacattgttgtgaatgttttacatgcatcagctctttcaacatttacagcatctgtgtgtggtaggtaatgttgtttccttcattttgcagagcagaatatagataggctcaggttaagaatttgcccaaggttacacagttatgaagtttggatttaggaatgggaggccacgtagactggcttcagaattcatgtctttaaccactttattgcttctcatgttggggggtttgttttctggtcactatttttactaaagttgattcaacaatgctataatctgttactctcattcgacaatacatcttgactgtttcttcaacttgaggaaggtaaaccaaagccactctttaatgggtgcaaatatctgttgtaactatgtagaagatacagtgtctgggtttgaggacaggggagtgggaaaactgagtagggaagcggtaagacatgcatctggctttaggagtgtttgaagtgcctaaagatcagggtgaatttcccaaatttgaatcttgttgcccaagccacattgcaaccacctctttttctcttacctcgtccccacatccaggcactgccccattctgttcattccacctttttttttagtagaccctccatatatgtgtgtgttttggtgaatggccacacacagcaaagttatttttattgcaattttgttgttgttgtttgagacacagagtctcatactctgccacccagactgaagtgcagtggtgcgatctcagttcactgcaacctccatccccccatgttcaagcaattctcctgcctcagcctcccaagtagctgggattacaggcatgggccaccatgcccggctaatttttgtattttttgtagacacggggtttcaccatgttggccaggctggtctcacactcctgacctcaggtgatccacccgcctcggcctcccgaagtgctggcattacaggcatgagccaccacacccagcctttattgcaatttttggttccctcacagaatgtttaccatgaagctgtgcgtataggtggtaccatgtatgacataccttgacctcaaagataatctacctgggctttttttgtttgtttgttttgagatggagtctcactctgtcacccatgctggtgtgcagtggcgtgatcttggctcacagcagcctctgcctcccgggttcaagcgattctcctgcctcagcctcctgagtagctgggactacaggtgcctgcgaccacacccagctaatttttgtatttttagtagtagtgggatttcaccatgttggccaggatggcctccacctcctgacttcatgatccacccgcctcggcctcccaaagtgctgggattacaggcgtgagccaccgcacctggcctacctgggcttttttggacagatgtacatgattttagaaattgttatgaatgactgtcttgggatcctcaagaacacccccaggtttgacgatttgctgagaagactcaggtctcagcattctgtcatactcaacagctatgatttactgcagcaaaaaaatacaaagcaaatagtaaagggaaaaagccaaaattcagagaaaaccaggcacaatcttctgagtcttgtttcagtgaagtcacaggatgtgccttatttaagttccatctggtacttatgacaacacatgctatatgtccactgggaagcttattagagactcagtgccagggtttttattgggcatgttttctagcacatcccacaattctggacttccagaaggttagcaggggttcagcttttcagctgaaaacgttatccccctttcagctggggggaaaaaaaggcaccgaaaaacagggcagtgagctactcctgttttgggtgggtggagcagtagtaagcctcccaaaatctaaggtcccacactccagcaagggtgaaccttgcaaactcaaaaggatagcagtctccaacctgctgttttatacagtgacttaagtggtactaaaatgctatataagtcaaatttacgtaacattaagcaaataattttttttcagcaaaaaaataatggtcatgactttgtggtgaaggcttatgtaatgattgtaataaattcaggtggctcacgcctgtgataccagcacttttgggaggctgaggcgggtggatcacttgaggtcaggagtttgagaccagcctagccaacatggtgaaatcccatctctacaaaaatgaaaaattagccgggcgtagtggtacatgcatttagtcctagctacttgggaggctgaggcaggaaaatcgcttgaacctgggaggcagaggttgcagtgagccgagatcatgccactgcactccagcctgggtgacagagtgagactgtgtctcaaaaaaaaaaaaaaaaaaaaaatgcctcagttttgttaagaggaaaaagcaaatcctaagttacagtggaacttatgaacaccctagcctagagatttaatttagtgatgaaaaggtacagagagagtctttcaagaaaggacctagtctgctcgcgttctctctctctctctctctatatatatatatgtatatgtgtgtgtacatatggaccacttcaagctacacacacacacacacatatacacgtgtatgaatatatatatatggctataagtggtgcgacttgcaggtactccctttgttcacctttgtaaagatgttattgccagttcagtgtgtatttctatagtatatatgtaaacaatttgtcatccttttgttgctgcttttgaaactagttcatggcttcagtgggggagagatttaaataatatgggtttataatttctgcattattaaatgcagataacttgtgattaaagagtatgttattggaaaaaaaaaaa

SEQ ID NO: 1298 - DNA, 2934 bp, Homo sapiens
aaagtccccggcccgttttcctcctgtgaagacatagctgcgggtggctgtgctggtggcgttcaagatgtcgaccaagaatttccgagtcagtgacggggactggatttgccctgacaaaaaatgtggaaatgtaaactttgctagaagaaccagctgtaatcgatgtggtcgggagaaaacaactgaggccaagatgatgaaagctgggggcactgaaataggaaagacacttgcagaaaagagccgaggcctatttagtgctaatgactggcaatgtaaaacttgcagcaatgtgaattgggccagaagatcagagtgtaatatgtgtaatactccaaagtatgctaaattagaagaaagaacaggatatggtggtggttttaatgaaagagaaaatgttgaatatatagaaagagaagaatctgatggtgaatatgatgagtttggacgtaaaaagaaaaaatacagagggaaagcagttggtcctgcatctatattaaaggaagttgaagataaagaatcagagggagaagaagaggatgaggatgaagatctttctaaatataagttagatgaggatgaggatgaagatgacgctgatctctcaaaatataatcttgatgccagtgaagaagaagatagtaataaaaagaaatctaatagacgaagtcgctcaaagtctcgatcttcacattcacgatcttcatcacgctcatcctccccctcaagttcaaggtctaggtccaggtcccgttcaagaagttcttccagttcgcagtcaagatctcgttccagttccagagaacgttcgagatctcgtgggtcgaaatcaagatccagctccaggtcccacaggggctcttcttccccacgaaaaagatcttattcaagttcatcatcttctcctgagaggaacagaaagagaagtcgttctagatcttcttcatctggtgatcgcaaaaaaagacgaacaagatcacggtcacccgaaagccaggtgattggtgaaaacactaaacaaccctgagcccagggccaacccctacggaacaccactactttacccagacgccacaggtcatcatctggatcatcccattctggttcccgttcaagttcaaaaaagaaataatgtattaaaatttacatcttaaaaaaatccagtacagtgcatgaagcatatttttaaagaagttggtgtcttacttggtcagaagtgctaaatctgctagtagaggtgcatgcctttcattgcttttcaaaacaatacagctgtgtttatttgtgaagttaaaagtaaatagcattttaagccataatgtcccaaaatagatgttctgtcattcattatttacaaccatttgcttcatttaaaaccatttcagctataacaaagtactttgcttcctaatttaaacccatttttgtcatttccaaatacatcctgtccattggctaagacaggattacctaggcttgcctgaactttgggcatggaagaaagactggaaactagttggaaacaacatacttatggaaaagaaagtcagcctttttatgctgttaacagatgtcagagtgattctcaccaaaaaaagttaaactatgttgtaagcagccaactgtaaatgtctattttgaaattccctatgctaagggtgccttagaatcattgtgtctcttttatccagctttacttttttgctccacatttaatgcaaaagaatcttgtgatgtctacaaggagagaagtgggatatattttcctttctgacacataatttggggcaaaaaagaaagtcttaagagtttatcttttctctgctgatacggttgcttgataaagacatctcaaaatgtttaccaatgttttaagaagctttgtgtgatattcttccaaatgtagttaccaaatataatatggtagaaaaggctaaatcatacttaatgagcaaattgaagtaagcttttaaagtatatttctcttttggtgaaaggccaatggagacattgtgaatttaagtgaacatttgcctcaagatgttaactataaacacactgcatacaattttcttctgaataacaaatgaatgcttattgctgcatgatgtaagcaaaagtcattatttttcctattcatttgaaataagttatggcttaaaatgcttttggagtttatttctcaaaattaaaatctggtcacatgagctttagtttgttttctggtttaaaaaataaaaaggtttctcttaacagtatttccagtgacaatgcaaggtaagtatatcaaaggaaatcaacagttgtgcttgggggctttttgttatgggatattgatttcttgttttttttccgtaacattgtctgctgcaatttaaataaaaattacgacattttaagatatttcatagacaaaccaaacaaaaatatatgtttttactttaaagtgaatgtttttctcttcagctgatctaaaaatgaaagcaagatatcttatgtagaaatattttgataatatttttacagtgagctttcccatgtttttatgtcttaagtttctttgctgcgtttatgtaggttgcacaagaacttttactcacttgtaattgtgcctcagactttttgaaagtctaccttctaaattgccccgacgatctagattctacatgttaccattggtttattcttgtgctttctgtatttaaaactttggctgtactaagcaaatgcaaggttataatttagctaatagtagtttacagacaattctgatgattatgatttcatttggtttaactaagctgtactagttcatttcataaggaaatgatactgtagacaaatgtaaataaagcctgtgagtcaagcatcaagtggtgtttgttagaaataaactagagatttttaaactctgaaaaaaaaaaaaaaaaa

SEQ ID NO: 1299 - DNA, 656 bp, Homo sapiens
aaaaccctataaatgtaaggattgtgggaaagccttcactcagaactcagaccttactaagcatgcacgaactcacagtggagagaggccctatgaatgtaaggaatgtggaaaggcctttgccagatcctctcgccttagtgaacatacaagaactcacactggagagaagccttttgaatgtgtcaaatgtgggaaagcctttgctatttcttcaaatcttagtggacatttgagaattcacactggagagaagccctttgagtgcctggaatgtggtaaagcatttacgcattcctccagtcttaataatcacatgcggacccacagcgccaaaaaaccattcacgtgtatggaatgtggcaaagcctttaagtttcccacgtgtgttaaccttcacatgcggatccacactggagaaaaaccctacaaatgtaaacagtgtgggaaatccttcagttactccaattcgtttcagttacatgaacgaactcacactggagagaaaccctatgaatgtaaggagtgcgggaaagccttcagttcttccagttcctttcgaaatcatgaaagaaggcatgcggatgagagactgtcagcataaggaatgtgggaaaacctaaaggtgtccctgttctctctgaagacatgaaaac

SEQ ID NO: 1300 - DNA, 3281 bp, Homo sapiens
ggagagcaggggcggcttccgggatttggcgggggccttcgtcggctccagttagagctcgggtctcctcgccacagctccgagtctttcgttctgggaggcccaggcggcttcgcgttctgagaataaacagaacctctgttgctctgcgacttgcaggcactgggagattcgtagctaagacgccagggcatcccggaagctgggaaatgggactgttgacattcagggatgtggccgtagaattctctttggaggagtgggaacacctggaaccagctcagaagaatttgtatcaggatgtgatgttagaaaactacagaaacctggtctctctgggtcttgttgtctctaagccggacctgatcacctttttggaacaaaggaaagagccttggaatgtgaagagtgaggagacagtagccatccagccagatgtgttttcgcattataacaaggacctgttgacagagcactgcacagaagcttcattccaaaaagtgatatcgaggagacatgggagctgtgatcttgagaatttacatttaagaaaaaggtggaaaagggaggagtgtgaagggcacaatggatgttatgatgaaaagacttttaaatatgatcaatttgatgaatcctctgttgaaagtttgtttcaccagcaaatactttcttcttgtgccaaaagctataactttgatcaatataggaaggtctttactcattcatcattgcttaatcaacaagaggaaatagatatttggggaaaacatcacatatatgataaaacttcagtgttatttaggcaggtctctactctaaatagttaccgaaatgtttttattggagagaaaaattatcattgcaataattctgaaaaaaccttgaaccaaagctcaagccctaaaaatcatcaggaaaattattttctagaaaaacaatacaaatgtaaagaatttgaggaagtctttcttcagagtatgcatgggcaagagaaacaagaacagtcttacaaatgtaataaatgtgtagaagtttgtacccagtcattaaaacatattcaacatcagaccatccatatcagagaaaactcatatagctataacaaatatgataaagatcttagtcagtcatcaaatcttagaaagcagataatccataatgaagagaaaccatacaaatgtgaaaaatgtggggatagcttaaaccatagtttgcaccttactcaacatcagatcattcctaccgaagagaaaccctataaatggaaagaatgtggcaaggtctttaaccttaactgtagtttataccttactaaacagcagcaaattgatactggagaaaacctttacaaatgtaaagcatgtagcaaatcttttactcgttcctccaatcttattgtgcatcagagaattcacactggagagaaaccatacaaatgtaaagaatgtggcaaagcctttcgctgtagttcataccttactaaacataagcgaattcatactggagagaaaccttataaatgtaaagaatgtggaaaagcttttaaccgtagttcatgccttactcaacatcagacaactcatacaggagaaaaactttacaaatgtaaagtatgtagcaaatcttatgctcgttcttcaaatcttattatgcatcagagagttcatactggagagaagccttataaatgtaaagaatgtggcaaagtctttagccgtagttcttgccttactcaacatcggaaaattcatactggagaaaatctttacaaatgcaaagtatgtgctaaaccttttacttgtttctcaaatcttattgtgcatgagagaattcatactggagagaaaccctataaatgtaaagaatgtggcaaagcctttccttatagttcacaccttattcgacatcatcgaattcatactggagaaaaaccatacaaatgtaaagcatgtagcaaatcttttagtgactcctcaggtcttactgtgcatcggcgaactcatactggagagaaaccctatacatgtaaagaatgtggcaaagcctttagttatagttcagatgttattcagcatcggagaattcatactggccagagaccctacaaatgtgaagaatgtggcaaagccttcaactataggtcatacctcactacacatcagagaagtcatactggagagagaccctacaaatgtgaagaatgtggcaaagccttcaactctaggtcatacctcactacacatcggagaagacatactggagagagaccctacaaatgtgatgaatgtggtaaagccttcagctataggtcatacctcactacacatcggagaagtcatagtggagagagaccctacaaatgtgaagaatgtggcaaagcctttaactctaggtcatacctcattgcacatcagagaagtcatactagagaaaaactttaaaaatgtaaaacatggagcagattttttacttgttacccatgtcttattgtgcatcagataatttatatgggagtgaaaccctacaaatgttaagaatgtggcataacctttaactattttcaagccttacacaatagcagagaatataaactgaaaaaatccatacaaatattaaaaatgtggcaaattattttaaactgtgctcaacccttactcaagataatccatactagagaaacactatagatgtaaaaatgtgaaaagttttattcaaaatatcaaacttatgagtcacctaggggttcatagaaaaaggaagtttgcagatgcaataaatgtgaggaagtatttaataaaaaatgaagtctaaatgtgtcagagaatttatgtgagaaaggactaaagcacagacactttcagcctttatactaaataagagtattttttgtacagaataatctaaaggcaaaataattagataatttatttgcttatatgttttaaagtagcaagaacattgatgttttgacaggtatatttcatagatacttcatttgtatttacagtatttgaggtttttggaaagcaaatattatttatataattcagctttcaaatctgttgctgcttttccttaatccgtggtgttcatgtgaaaatatgtgttctgtttttttttctgcatcagaacaatgtgaggtcattctacgttaatatcattaatatcagcatttttcatggaagtttaatgccaaatgtaaaacacatgaaaatttttaaaaatatgctctttgtgtttgaataaagtagtaatgcacgtaaacaaaaaaaaaaaaaaaa

SEQ ID NO: 1301 - DNA, 3826 bp, Homo sapiens
ccggcgcgggagtaactcctcgcagaggcctctgggagttgtagtttttttgcctttgcctctccatgacgcaattcctgtgcgacatacgtagcggccgccattgttccgcgccgatggcgagatccttgttcctcagatagcgttcatcgcccgtcgtggtcaacgggccagccgagtctggagtggttgcgaacccttctggctgcagatctggaggtggaggcagtaccctggactctattctgctgccccttcagggtttggaggagccggagcatccctcgcgtcctgtcacttccagcgaggcacacaaaactgaccgtagggatggccaccagggtccggacagcttctatttgggtcccacctctccaagaacgaaacagttcatgggataggatcagaaagctccaaggtcaggaatccatcttgggccaagggactcctggtctgcaacctctccctggaacacccaggcagaagcagaagagtcgcagaatagagaaagtcctagagtggctgtttatttcccaagagcagccaaaaatcaccaagtcctggggacctttgtcattcatggatgtgtttgtggattttacctgggaggagtggcagctgctagacccagcacagaagtgcctgtacaggagtgtgatgttggagaactatagcaacctggtgtccctagggtaccaacacaccaaacctgatatcatcttcaagttggaacaaggagaagagctgtgtatggtgcaggcccaagttccaaatcagacctgtccaaacacagtctggaaaattgatgatcttatggattggcatcaggaaaataaagacaagctgggaagtacggcaaaaagctttgaatgcactacatttggaaaactatgtcttcttagtacaaagtatctttcaagacaaaaacctcataaatgtggcacgcatggaaagagtttgaaatatatagatttcactagtgattatgctagaaataatcctaatgggtttcaggtacatggaaaatcattcttccattctaaacatgagcaaactgttattggaataaaatactgtgaaagtattgaatctggaaaaaccgtcaataagaaatcgcaacttatgtgccaacaaatgtatatgggcgaaaaaccctttggatgcagctgttgtgagaaagccttcagcagcaagtcataccttctagtgcatcagcaaactcatgccgaagagaaaccctatggttgtaatgaatgtgggaaagacttcagtagtaaatcatacctcattgtacatcagagaattcatacaggagagaaactacatgaatgcagtgaatgcaggaaaacattcagtttccattcacagcttgttatacatcagagaattcacacaggtgagaatccctatgagtgctgtgaatgtgggaaagtcttcagtaggaaagaccagcttgtttcacaccagaaaactcattcaggacagaaaccatatgtgtgtaatgaatgtgggaaagcttttggtttaaaatcacagctcattatacatgaaagaattcatacaggagagaaaccatatgaatgcaatgaatgtcagaaagcctttaatacaaagtcaaaccttatggtacatcagagaacccatacaggggagaaaccttatgtttgtagtgattgtggaaaagcctttacattcaagtcacagctcattgtacatcaggggattcacacaggagtaaagccctatgggtgtattcagtgtggtaaaggattcagtttgaaatcacagctcattgtacatcagagaagtcacacaggaatgaaaccttatgtatgcaatgaatgtggcaaagccttcaggagcaagtcataccttattatacatacaaggactcatacaggagaaaaactccatgaatgcaacaattgtgggaaagccttcagttttaaatcacagctcattatacatcagaggattcatacaggagagaacccctatgaatgccatgaatgtgggaaagccttcagtcggaaataccagcttatttcacaccagagaactcatgcaggagagaagccttatgaatgcaccgactgtggaaaggcttttggtttaaagtcacagcttattatacaccagagaactcatacaggggagaaaccatttgaatgtagtgagtgtcagaaagcctttaatacaaagtcaaacctgattgtacatcagagaactcatacaggagagaaaccctatagttgtaatgaatgtggaaaagcctttacgttcaaatcacagctcattgtacataaaggagtgcacactggagtaaaaccctatggatgcagtcaatgtgcaaaaacctttagtttgaagtcccagctcattgtacatcagagaagtcacacaggagtaaaaccatatggatgcagtgagtgtgggaaagccttcaggagcaagtcataccttattatacatatgagaactcatacaggagagaaaccacatgagtgcagggaatgcgggaaatcctttagtttcaattcacaactcattgtgcatcagagaattcacacaggagaaaatccctatgaatgcagtgaatgtgggaaagcctttaataggaaagaccagctcatttcacatcagcgaactcatgcaggggaaaagccttatgggtgcagtgaatgtgggaaagcttttagcagcaagtcatacctaattatacacatgagaactcattcaggtgaaaaaccatatgaatgtaatgaatgtgggaaagccttcatttggaaatcactactcattgtacatgagcgaactcatgcaggggtcaacccttataaatgcagtcaatgtgagaaatccttcagtgggaaattacgccttcttgtacaccagagaatgcacacaagagagaaaccatatgaatgcagtgagtgtggaaaagccttcattaggaattctcaactcattgtacatcaaagaactcattcaggagagaaaccctatgggtgcaatgaatgtgggaaaaccttctctcaaaaatcaattctcagtgcacatcagagaacacatacaggagagaagccttgtaagtgcactgaatgtgggaaagccttttgttggaagtcacagctcattatgcatcagagaactcatgtagatgacaaacattgataattttacgaaactctgaaaagtggattcacaagagatagaaacaatcatatataaagagaaactctgtaagtggaatcatcttgtcatcttccagaaaactcatactgaatagaactttatgaatgcacagcatatggaaaggcatccacagaaagctgttctttacatgcaaaaagatagtagacaatacacaggaaaactgaatttagtaaccactctgaaaatttttagcagcaagtcatacctttttttaaaaagttcatacaggtgaggaaccatgttaaacgttgtaaagtcattttactaacataagattcacaaagaggaaacttcatgaaccagatgaatatagaatagacttctttgaaattcatagtttacagaattttaatgagagaaattattgagctaatgaatggcagaattaacaaaattacaaacattttatgtatcggaagcatataccttggagggaccatgctatgagggaaagtgtaaatctagaaatgagaaacccctagggaaaaaatatatataggagtgaacatcttatgaatgtaccaaataaaccacagctggactgttaacctcaccttagaagcttctttctaaaaaaaaaaaaaaaaaaaaaaaaaaaaaaaaaaaaaaa

SEQ ID NO: 1302 - DNA, 4897 bp, Homo sapiens
gagcactcctcccagattcctagagcggacagggcgatggcaggttcgccgggtgtgaggcttcacagcggtccggtgaccaagtcgagatggtgagaacaagaccaagattggaaagccagcttcagaggagggaattacagcaaaaattgaaccattgacagaagagtctagcagtctcagaatgttctccaggattctgaaggcaaagaattctgtgaatttggggataaattaaatgaaaaagatcagaacgtctttaaaaggagacctcataactgtgacgaatatgggcaaagctttgtttggagtacaagcctttttaggcatcgaaaaacgcactgtgagaaaccttatgaatgggataagtgtggaaaggccactggggagaaaccttattcctgtaattggtgtattaaaagtttcagttggagctcagaccttattaaacaccaaagagtccacactggtgaaaaaccttataaatgtgatgagtgtgggaaagccttcagtcagagctcagatcttattatacatcagagaatccatataggagaaaaaccctatcaatgccgtcattgtagtaaaagttttagccagcgctcagatctggttaaacatcagagaatccatactggagagaagccttatacttgtaaccagtgtaacaaacattttagagttctgatgtgataaaacatcaaagaatccacactggggagaaaccatataaatgtgatgtgtgtgggaaagccttcagtcagagctcagatcttattctgcatcagagaatccatactggggagaaaccatatccatgtaatcagtgtagcaaaagtttcagtcagaattcagaccttattaaacatcgaaggatccacactggagagaaaccctataaatgtaatgagtgtgggaaagcttttaatcagagctcagtccttattttacatcagaggattcatactggagagaaaccctatccctgtgatcaatgtagcaaaaccttcagtaggctttcagatcttattaatcatcaacgaattcacactggagagaagccttacccatgtaatcagtgcaataaaatgtttagtcgaagatgagatcttgttaaacatcacagaattcatacaggtgagaaaccctatgaatgtgatgaatgtgggaaaacctttagtcagagctccaaccttattcttcatcagagaatccacactggagagaaaccttatgcatgtagtgattgtactaaaagctttagtcgccgttcagatcttgttaagcatcaaagaatacacactggagagaaaccatatgcatgtaatcagtgtgataaaagttttagtcaaagctcagacctcactaaacatcagagagtacactctggtgaaaagccttatcattgcaatagttgtgagaaagccttcagtcagagttctgaccttattcttcatcagagaattcacactggagaaaaactattatctgtgcacacagtgcagcaaaagtttcagtcagatctcagacctcattaaacaccagagaatccacactggggaaaaaccatataaatgcagtgagtgcaggaaggctttcagtcagtgctcagctcttaccctacaccagagaatccacactgggaagaaaccaaatccatgtgatgagtgtggcaaaagctttagtcggcgttctgatctcattaaccatcaaaaaatacacactggtgaaaagccgtataagtgtgatgcatgtgggaaagccttcagcacatgtactgatcttattgaacaccagaaaacccatgctgaggagaaaccctaccagtgtgttcagtgcagcagaagttgtagccaactctctgaacttactattcatgaggaagtccattgtggagaagacagtcaaaatgtgatgaatgtgagaaaacctttagtgtgtacaccaactctattcagtaccagagacactgtaccagaaaaaaatctaatgaatgctgttgattattgatgagtatgaaaaaggttttaatcagtgttcaactcttatgctacattaaaaccacactggatccggatacgtatggtggctcacgcctgtaatcccaacactttgggaggcagatgtggaagcatcatttgagcccaggagtttgaggctgcagtgagctatgattccaccattgcactccagtctgggcaacagagcaagaccctgtctatttaaaaaaaaaaaaaaaccaccaataccacatgggagaaaacattaattcagtttttgtaatgaaaggttaactcagagctcagacattactaaaattaagaaaaattctccagcctgaccaacatggtgaaaccctgtctctaccaaaaaataaaaaataattagctgggcatggtggcaggcgcctgtagtcccagctattcgggaggctgaggcatgagaatcacttgaacctgggaggtgggggttgcagggagccgagatctgccactgcattccagcctgggcaacagagtgagactctctcaaaaaaaaaaaaaaaagaaaaaaaaactctgaggaagagtcctgcgagttgtgggaaaaccttcaaagtgaaaaacatttttactgaatgtcagtataccacaatagaaacaaatttctatcttttctataaggttggaaaagctctagtcttattcagacataacctacaggaagagagttgtattattgtaagagatctaatgcagaacttatcagatattgtaaaaatcagtgtgggaggtattcagtcaaaagtcagaaggaaatgtattatcgttataatttcaaaccttaagaaagcctaaattaccaattgcatatcaaatttttttgataatgtaaggaaaacttaaatcccctccatatcctaattggcatttataataatatgacacttaaccctgacagctagagtcttactttatgctaatgctagatatctatttttaaattccacgtgtgtaaacatgctatactcttctgatattaaacttactaagtacataattccagtgcccccttttctcagaatttttttttgtttttaattttggggggtatagttttggttttcctagtgcacattagtttgtgcaagttcttgcaatgttcacagcaaatatagatttattttgctttgaataatgcagcccataaactttattggtttgaaagttcttcactaccatttaatcacagcttctaaacatgtgaaacaggatctttaaaaaaattttccatatgtcaaagtgtagagatgtttctagcagcatttatcttgtcatctatagattgaacaaaaagtggtagctgtgaaattgtgatttataataaatacatatttggtcttcatcccctggtacagagcttctaagacccttgaaatttcctgagtggtaagagtaattaggatgacaagcccctttaaccacacctgagtttatgttaatgggattacttttggaaagacagaaccacaggatgggggctagttgcctcgagaaccaaccatgtgattagagggttggaactttcagatcaaccccaccctaccttgacctctgagaggagagaggctggagactgaattcagtcaccagtggccagtgatttaatcattcatgcctacgtgatgtagccttcataaaaaactgaaggacaggattcagagagcttccaggttgaacttgttgaggtactaggagggtggtgtacctagggagggcatggaagctcagtgttcttcccacacaccttgccttatgcatctctttcatctggctgatccttagttgtgttcttttacaagaatctagtaaataaacttttcctacattctatgagtcattctagctaatgctgaaactcaaagaggggattgtaggaaccttggatttatagccagttggtcagaagcaccagtgaaaacatggacatgagattggtgtccaaaactgacacaattggtgtcagttgtagaactgagcccttaacctgaagcatctatgttgatctgattccaggtagatagcttcaaaatttaattacaggcacttagtgggtgtccacagaaaattggagaattgtttggtttggggaaacctcatacacatctggtgtcagaaatgttgtgagtatagagaagacaataagtttttcctatacagtagctaaagtacctacatcattaatttgtatagtatattctgtgtaaaaataagactttctgatatttttttcaagtggcaacatttatcagacttttttgatttctgacatacatactgaaaacaggcaacatacatgcaaagttttccactgaaaaatagaaatagtttgaaaaaataaaaaattcaaattgtctttctggtattaacaatttgataagttctgctactaaaagtactacaaagttgtttcctttgattatcccctataattgtctaattaatattttaatttagcagacattgttaaattctattccttaggagtgtaatgctaaggcaaggccttttgggaggttttgtagtacattaaaagaatatactatctcttccaatgaagtgtatattgtatagtgatagagactaatatgtacagaaaacacatggctcaatgtaatcataaaggtaggacatgcttgtaagaactcagaggagtcaaggttcaattctgattagaaagaaaagggagagctttgtggaactcctgaagtttgagccttgaaggatgggaatagaggcataaaggcagggagggaataatcaacaaaggcacaaaaggaagtgcaagaaatgtggagcatggtggttatcatttattcaataaatattcagtgtcaggcaaaaaaaaaaaaaaaaaa

SEQ ID NO: 1303 - DNA, 746 bp, Homo sapiens
gaaaagccttttgagtgcaaagaatgtgggaaagcctttagcattcgaaaagacctcattcgacacttcaacatccacactggagagaagccctatgagtgtttacagtgtggaaaggcttttacccgcatgtcagggctcacaaggcaccagtggattcatactggagagaagccgtatgtatgcatccaatgtgggaaagccttttgtcggaccacaaacctgattcgacactttagcatccacactggagagaagccctatgaatgcgtggagtgcgggaaggccttcaaccgcaggtcacccctcacaaggcaccagcggattcacactgcagagaagtcccacgaacccatccagagtgggaacgtttcttgtgagagcacagatctcattcaacactccatcatccacactgagagtagcccagtgagtgcagtgaatatggaaacgccttcaattgccgctcattcctcctcactcgacatcaacggattcatagtggaagaaaccctaccattgtaacagatgtggaaagactttttacgtacacttcagtcaacatccaagaattcctattagcgaaatagttttttaatataaccactgaagaaaatctgtggtgagaggaaacatcttaccatctggtcattcatactgaagagaaactccataagtatcatctctgtgggaaaacctgttttagatcatcatttgtcatctaaacaattatgttagaaattgac

SEQ ID NO: 1304 - DNA, 981 bp, Homo sapiens
aagaatgtggcaaaggctttagtatattctcaacccttactaaacataagataattcatactggagagaaaccctacaaatgcaatgaatgtggtaaagcctttaactggtcctcaactcttactaaacataagagaattcatactggagagaaaccctacaaatgtgaagaatgtggcaaagcttttaaccagtcctcaacccttactagacataagatagttcatactggagagaaaccctacaaatgtgaagaatgtggtaaagcctttaaacggtccacaactctaaaacataagagaatttatactaaagagaaaccatacaaatgtgaagaatgtggaaaagcctttagtgtattctcaacccttactaaacataagataattcatactggagcaaaaccttacaaatgtgacgaatgtggcagtgcctttagggcattctcaacccttactgaacataagagagttcatactggagagaaaccttacaaatgcaatgaatgtggtaaagcctttaactggtcctcaactcttactaaacataagagaattcatactggagagaagccctacaaatgtgaagaatgtggcaaagcttttaaccggtcctcaaaccttactcgacataagaaaattcatactggagagaaaccatacaaacctaaaagatgtgacagtgcttttgacaacaccccaaacttttctagacataaaagaaatcatatgggtgagaaatcctagaaatgtgaagaatgtgacaaagcctttaagcggttgtcacacttgattgtatataagataattcatactggagaaaactcccagaagtgtgacaaatgtgacaaaacatttaattaattctcataccttattgcacaggaaagcatttatacttgagaaaaattgtataaagaatggaaaagtcattaatatctgctcatatcttaacatcagcgagttggtatttaataaaagc

SEQ ID NO: 1305 - DNA, 2538 bp, Homo sapiens
cgcccccaccgccacccaaccaagcatcacccattccagcacttccggcctgacccctgtccagcgcctttcctttctccagcttctgctctgccccaagagtggtcgccttcgtggcagggcacgactctctcccagctcgggtcgccgcccacattagtgtggggccctgcggcctagcgtccctcaccagaggcctccccttgcctagctggaccgccgagggacatcgacgagtatcctcctcctgctgtccccggcttcgcctgccgcccctaaccggccagtcaagatggccgccgctgggtgaggcaagctggcgcgccgcgggggcgtctgggagttgtagttcgggacggcgggctgacgcacttcgccgccggccgacgggcgccattgtgcggcgcgcgccggagtatcctgagctccagctggaccctaaattggatcctcttcctgctgagagtcccctaatgaacattgaggttgttgaggtcctcacactgaaccaggaggtggctggtccccggaatgcccagatccaggccctatatgctgaagatggaagcctgagtgcagatgcccccagtgagcaggtccaacagcagggcaagcatccaggtgaccctgaggccgcgcgccagaggttccggcagttccgttataaggacatgacaggtccccgggaggccctggaccagctccgagagctgtgtcaccagtggctacagcctaaggcacgctccaaggagcagatcctggagctgctggtgctggagcagttcctaggtgcactgcctgtgaagctccggacatgggtggaatcgcagcacccagagaactgccaagaggtggtggccctggtagagggtgtgacctggatgtctgaggaggaagtacttcctgcaggacaacctgccgagggcaccacctgctgcctcgaggtcactgcccagcaggaggagaagcaggaggatgcagccatctgcccagtgacagtgctccctgaggagccagtgaccttccaggatgtggctgtggacttcagccgggaggagtgggggctgctgggcccgacacagaggaccgagtaccgcgatgtgatgctggagacctttgggcacctggtctctgtggggtgggagactacactggaaaataaagagttagctccaaattctgacattcctgaggaagaaccagcccccagcctgaaagtacaagaatcctcaagggattgtgccttgtcctctacattagaagataccttgcagggtggggtccaggaagtccaagacacagtgttgaagcagatggagtctgctcaggaaaaagaccttcctcagaagaagcactttgacaaccgtgagtcccaggcaaacagtggtgctcttgacacaaaccaagtttcgctccagaaaattgacaaccctgagtcccaggcaaacagtggcgctcttgacacaaaccaagttttgctccacaaaattcctcctagaaaacgattgcgcaaacgtgactcacaagttaaaagtatgaaacataattcacgtgtaaaaattcatcagaagagctgtgaaaggcaaaaggccaaggaaggcaatggttgtaggaaaaccttcagtcggagtactaaacagattacgtttataagaattcacaaggggagccaagtttgccgatgcagtgaatgtggtaaaatattccggaacccaagatacttttctgtgcataagaaaatccataccggagagaggccctatgtgtgtcaagactgtgggaaaggatttgttcagagctcttccctcacacagcatcagagagttcattctggagagagaccatttgaatgtcaggagtgtgggaggaccttcaatgatcgctcagccatctcccagcacctgaggactcacactggcgctaagccctacaagtgtcaggactgtggaaaagccttccgccagagctcccacctcatcagacatcagaggactcacaccggggagcgcccatatgcatgcaacaaatgtggaaaggccttcacccagagctcacaccttattgggcaccagagaacccacaataggacaaagcgaaagaagaaacagcctacctcatagctctcaagccagttgaagaaaccttgccttttcagcttgaccctgcaatataacatgcacaggcctgcttgtgaatcaggactgaatgtgaaagggaagtattgagtgaggacattcccaaaaccaaaggacaactgaggagactgcccagcacataatgaataaataagaaaatgagtgaggagttattaacatcatttggaaaaaagatttcccattcacttgatattgtttgttcactcatttagtcattaaaagtgagattaataaaatctgaaaatgttatataataactttaaaaagccaggtaattaataatctgcactgatattacatccacagtaccacagtatttatgtgtatgaattaaggattaaaagataatgtggataaataaactattgatctatgtctgtgt

SEQ ID NO: 1306 - DNA, 6599 bp, Homo sapiens
gggctgttagctcggctgggcacgggcggctccgtggcgcttcctgccacgccaggcctgcctgggccgcgccagcgccgctccaccgagggccgcgcgtcggccgccgccgggcctggatggggccttacctgccaggctgatcccttggagtagttctgaggcatgatgagtcatccgtgtgtgtctcttttggttccacctactccccaaggtcttaccctccccaggatggagccccaggaaaccaggtcctggcagtccctcttgagatgccagaggatttggtgacatttgatgatgtggcatggtacctcaccacaagggagtggtttaagctggaccctgaacagagggcactggaatattatgggaacgtgacctctgtgggcgttcctgttttaaatcctgccttggtccctcacctggcacaaggacaagtgctactggtgtcagacccatcgcccaacactgatcctgctaagtactctgaaagcacctccgcgacccgacaccagatgaagggggaagatgcccagccacaggagatggcgtccacaagcttcccaagggccagtggtcccagtcctgaattcagacagcacggggactctgacgggaagagagggagcccacagaatctgcccatagaacatcattttgcttgtaaagagtgtggggacacctttcggcttaaagtcctgcttgtccagcaccagagagtccacagtgaggagaagggctgggaatgtggcgactgcgggaaggtctttaggggggtggcggagtttaatgagcacaggaaaagccacgtagctgcggagccccagcccggccccagtagggccctggagaatgccgcggagaagagggagcagatggagagggaggcaaagcccttcgagtgcgaggagtgcggaaaacggtttaagaagaatgcaggcctgagtcagcatctgagggtccacagcagagagaagccctttgattgcgaggaatgcgggcggtcgttcaaagtcaacacccacctcttccgacatcagaaacttcacacttcggaaaagcctttcgcctgcaaggcgtgcagcagggatttcctggatcgccaggagcttctcaagcaccagcgcatgcacactggccacctgcccttcgactgcgacgactgcggcaagtccttccgaggggtcaacgggctggccgagcaccagcgcatccacagtggggccaagccatacgggtgtccccactgcggcaagctcttccgaaggagctcggagctcaccaagcaccggcggatccacacgggcgagaagccctacgcctgcggccagtgcggcaaggccttccgccagagctccagcctcctggagcacgcacgcatccacagtggcgagcggccctacgcatgcggcgagtgtggcaaggccttccgtgggccctctgacctcatcaagcaccggcgcatccacagcggactgaaaccctatgagtgcgacaaatgcggcaaggccttccgccggagctccggcctcagtcgccaccggcggatccacagtggggcgcggcgctgcgaatgcagccagtgtggccgcgtgttcaagaggcgctcggcactgcagaagcatcagccaacccaccacgagtagaaacgccctgtggtcccgcgggacagggacggagtccccagaggggatggcagagtcaaaggagatgaacagttttgtagcgcttatatattttgtcttccaaaaggttgagaccgatttatactgccaccagcaatttataagtgttacgttatgcccatcaagagtagcttgtaccatttaacttagtttggctagtttaactggtaggaagtaccatcaaggtatttcagtccacatgccttgaatccaagaatgagagaggacaaatctggatgtggggtagggaggggcttagaggtcatcaactccaagctccccccgccccagagaaacacacagagctgttccacgatggcgtcctcataatgtgatcccagctttcctgaagagaacgttgccctcatgatttttggcctacttgaatttataaatttttagggatgtaaatagaacactcaaatgtcttaaaatatttaatttattaatttagttatacatacatactgtaaatcacatattatataaaataatatattaatttagaaaataccccatttttgccaccctccctttcacgaaatcattttactctgactcctcaccgtcttcaccaacatgggaaccctgtttgagtcatcagacagtttcaagacacacccagtcacttccatccgagctctgcacggtcgctcagtgacgatcccttcatgaggctctcattagaaattttctcccaagccataagaccatatttgcagaacattaggacgatttctcttgtcgttttttaatctgtcctgtgactgtacaatataaccacttaaggtcatactttttcaaacaacctttaaacgtcttttcttttaaagcacccaaaatgtcattgtgaggccaaacgcctagtaacagttactgaatctgggttaaatgtcggtatctttttttcttaaaccatttcaatttggtgtcccctatacatatccaaaactagcatcgattggggttgttttgaactaatgggtcttgtcctcaagcagcactattttgttcaaaataaaatagttgagagcatgcccctaagaagagatacatctcaaggactcaagtgcagggtgacgcctccttttggaaatgagcctctcctggtatcaggcctagatggtacttctccagccttccgtttcttgttctataaaacaggggtgatcacagcacctacctccgaaggttatcacgaggactgccatcgtggctgcagagtgccaggaccaccggcctggtatggaggtacacactcagtgaaggccatctgctgtcattgtcattgtcatagttattgccgtcattctgtggcttgtcaattccagaactggggatagaccccaggcctcctgaccaccagtctcatctttctcttatgcgatgacttaaatggtgtttctgttttttgcatgcaaatggtccgttcatctcctttgactagttatcaacttaccttcggatatattaactttatgtagcagttctttctatattgatggtgatgttctcttttccaattttattgctttgctttttgtagcagttttattacgtttttgttgtgaaagcttttaatttttacatatccaagcattcattttttgtccactcagtcataactttcattgcttctgtagctagatatgatgacattttctctagaattttaattacaaacaaaaagctgcaaccccagcccatcagaaggtgagtacaccaggtgggcaggctggatggaaatgggccagagaagcaggctctttcctcatccgagatgcggactccctgtctatctgtgggcaccacttgactatccaacctgaccactgcggcacactggagatgctcccatcatagattagccagaactctgtgactgctcatcattatagaccccgccagcagcagtggggcttggcctcacctagatcaatggagtggtccaaacttggtctgggagcaagcagcccagccatcctttgagctcctgggagccttggcaatgctccgagtggattcagtgactgagcagcagattcacccaagaaacatctccttggacacaagaagacttgcctagaccacatcctcctttcagccggtgactctagaactagaaagagattggttcataggcttctgctgtgggcagctaggggaaaattcacccatgtgttctggcatcacttcctatagccacacctaagtgagggcaacagagcagaggctcggagaggaaccctgcccctccgatggcttgtgcgttatgctgatagaagctggcagcactgccctgggctatgatttgcaacagccatgcccaggaggagcactaaagcaaaggtttggagggcagtggaacccttctgaaagcctgtgtggcatagaagtagaagctggtcctcctgggtctgagctaccatttccagtgggctcccccaagaggaacagcagcaagggctagcgaggaacctgcccctccagtggcccacagaagccacagatagaagccagccccaccagggctgtgctgtgacttcccagcagctgtggctggggacagggacactaggagggcctggcaaggaagtgtgcccttctcgtgggcccaccaaggctgaggcagagcttcctagcagacacaacttggaagggcttctcaggcacccatcctgacccccaggctggagaggagccaaaagcacttgttacatagtgattccttttgccctgtgggcctcagttcttgcagtagttgtgaatctgtgtctgaaatcactactttcttctcggatcctttttctcttttcgagttgttaggatgtgttttgtacagctgtcatttgataaagaaggttgacctctaccaggggcaagtctggcacctttacctagaagtactctgccatgtcttgcccgttcatttatcgtttgttgggtttcatgagggatcccattgaagtagatcccttttatgaagggatcccattgaatgcagcattaactcagaacgtagcataaagtcgtcactgctcccagctgggacgtggtgtcttggcatcccttcctgccgtccttgactctttcccatcttcagttctataattttctcccaaacaaatgctcttttagagttaacactaaagatctggtctttgccgtcaaggttgacagaacagctgttcatggtgtttgcggtgaaacccgtgttctctttcaatgcagtctgtggctttaacgtgtgtcctgtaatttcgccaagatcatttcttgcctctggtaacttgggggtggatttccttgggctctctaggtgtactgctatgtcagatgcaaaatgtcacccagcttcctgtcacatatccttgtctgtgcattcatgcatctacctcattccggttttctttctaatctcatgtattcctgttgtgaggaaatgtgttcttttcccgatccttttgtagttcatacacatgacaattgggtttccacgcacgtgcatgagatgttcctccttcaaaccttgttactatgtcagcacattaactgcctggcatggaaaaagaaaaaaaaaaaagaaatatgttcttttcctaccatttgaaaaaaatcctccattgcttttattagagttttgaatacttgtgaaaattttcaaaagaaagtaattgattaccatttttgctgcttattacgatgagctgtgtccattagctgtgtcaccccactcttgcatttccagaatagtccctacccaattgcagcgggcatgtttttgagtggtgttgcattccatgtgcttgattttgtcctagaactggcacagcgcctgccctacctgcagccctgggttgtggccctgttgcgtaccatgtgatttgccaccccgcttctaggccatattaattcagccagaactgaacacctgacccaagggcagcaagcaatcatcagagcatagagctgacagaacatgatggaccacggacaccaccaggccttccagatctgaaatgcaaacaaggaaacagaagcttctaggcatcagaaggtgtggggagcagcacagtactcagaggagtgaggagcgtggcgcctgctgggaggaaggcctggccatggtatgttcttggatttctggcagcagccctcattggtccacgtgcgtccccactacagactccttgacttgagccagcttgagtgggtctctactcttttctattgtgttttgccacttggctgcttcctggccaagtcgcacctgactgcatgaacacctgttcaaacgtgtgttctctgttctctaagatgggtgaaagtcgatgccttctagtctcagtgaatttaacctgtgattttatgtctacgtatattgttcctttactgaacccaccacatgcgggccataaaatgagtgaaatcacagtgcaccctgttctcttatttttgaagtgtttcacgatttccagcatgtccatcagatggggggattgctaacttctctcttactcatgtacttacattctgtagttctcattgcatcactttggatgtttactttgaaaagcagaaactgtctctttaaacttggccctcaatgtcatttgcgtatctctgagaacaatagctatgtcccaccccagtttgtatttccgttggttgttggcacttttttctcattcccccatctcattaccttgtctgttttctggcactcactataatcagccttgcactagagctgtttgtggacttggcttcaccccctcctcctcagccctcccccacccattaaattgtgagctcttagaagacaggggtggcctttcatgtctgatcccctaccaaatctagcacagtgccttgcatcaagtagatttcaataaatatatgttaaatggc

SEQ ID NO: 1307 - DNA, 2687 bp, Homo sapiens
gtccagagcgcggcgtaggtgtggagaaaacattacgtcgacggggagttcgcctccagtagcgtttctactggtgccaccccgcctccgacccgccctgcggccctcccttttcttttctgccgggtaatggctgcttccaagacccagggggctgtcgcccgaatgcaggaagaccgtgatgggagctgcagcacagtcgggggtgtaggttatggggacagtaaggattgtatcctggagccgctttccctgccagaaagtccaggtggcaccaccactttagaaggttctccatctgtgccttgtattttctgtgaagaacattttcctgtggctgaacaagacaaacttctgaagcacatgattattgagcataagattgtcatagctgatgtcaagttggttgctgatttccaaaggtacattttatattggaggaaaaggttcactgaacagcccatcacagatttttgtagtgtaataagaattaattccactgctccatttgaagaacaagagaattattttttgttatgtgacgttttaccagaagatagaattcttagagaagagcttcagaaacagagactgagagaaattctggaacaacagcagcaagaacgaaatgataccaattttcatggcgtttgtatgttttgcaatgaagaattccttggaaacagatctgttattttgaaccacatggccagagaacatgctttcaacattggattgccagacaacattgtaaactgcaatgaatttttgtgtacattacagaaaaagcttgacaatttgcagtgcttgtactgtgagaagaccttcagggacaaaaatacacttaaagatcacatgaggaaaaaacagcatcgtaagattaatcctaagaacagagaatatgacagattttatgtcatcaattatttggaacttggaaaatcgtgggaagaagttcagttggaagatgatcgggagttgctggaccatcaggaagatgactggtctgattgggaagaacaccctgcctctgcagtctgcttattttgtgaaaagcaagcagaaacaattgagaagttgtatgtccacatggaggatgcacacgaatttgatcttctcaaaataaagtcagaacttggattaaatttctatcagcaagtgaaactggtcaattttattcggaggcaagttcaccaatgcagatgttatggctgccatgtgaagttcaaatccaaagcagacttaagaactcacatggaagaaactaaacacacttcgctgctccccgatagaaagacgtgggatcaactggagtattattttccaacctatgaaaatgacactctcctgtgtacactatctgacagtgaaagtgacctgacagctcaggaacaaaatgaaaatgttcccatcatcagtgaagatacatctaaactgtatgctttgaaacaaagcagtattttgaaccagttgctactataagagtacttgaaaacctagaagaaactaccacagaagcaatttttcatgtttttctcctatgagacagatatgaaagaacaatttaaatttgaacatcaacaaaagattggtccttggtgaaataaacttttcaaaaatgaatgttcttttcaaaaaataaagtagaaaaatgcacttactaagaacatgaaaaaaaatgaagtaggaaaataagatgaagactttgtattttggctgtaaagttttattgtgtgatcatcttaaattatctcacttcattaaactcataattatatatagaagtatatgtcaattacaaagaaatgaaatgttcaaattatttataaacctgatttttcaatcagtagtttcagtctcctccccaaggaccttcttcatccaacaagttgcaaaatttgaatatcccttctgtactatattgggtgagctgtaaatgtaatgactaaaagaaaagccacagaagaaagaagaaatggtcaaagacgtggataatatgcaaattggccattatattagaacaatcaagagctgactgtgttattaccactttctgcctagggtggccaaattccctagaaatagacatcaagccagttaacttcacttttccctgcaatttgtatgtcactaacatttaaatgccattttttaaaaacataaccacaataccattatgacacctaaaaaacattaacattaacttaatatcatctgttttcagtttttcccacttgtctcaaaatgtatgtttacaatattatcagtttcattactgatgaatattatatgcctcctgataagatgtactgaggaggacagaatatcacttttgtagatttataccaaaaatgcataatttggatataatgaagaaacagtcaaatccaagtttgaggctgggcacagtagctcatatctgtaatcccagcactttgggaggccaaggcagaggatcacatgaggtcaggagttcaagatcagcctggccaacgtggcaaaaccccatctctacgaaaaatacacagattagccaggcatggtggaatgcacctatagtcccagctacttgggaggctgaagcacaagaatcgcttgaatccaggaggcaaaagttgcagtgagccgagatcacaccactgcagttcagcctgggcaacagaccaagactctgtctcaaaaaaagg

SEQ ID NO: 1308 - DNA, 3812 bp, Homo sapiens
gggcctactctgccgccgccgccgcccgcccgctccagccgccgccgccgccgccaccgccctccaggctccgggacccggcccgcgccaccgcccccgtgcgcgccccgccgccgccgccttcgccttcgccttttgtttcctccgctccggcgcccccgccccggctcgcgctttgcaggggacgcagcgcgcgcccccagcgggcccgggaaaagccgcggcgcgcgcgcgcgcctgcgcggcggacccctccttctcctccccgcgtgcgcgtgcccttcttggctgcgcgccggcgccgcctggcgggcgggaggggaggtggcaggcgcgtttgcaggaggggcgcacctcttcgctcgcgcacccccccggaaggtagaccgggaaggggaggcgggcgggcggagaggagagagtggcgcgcagtccagcgagggcgggggttggctatgtggggggtggtgcaccccgcagtctagacagtctgatccgggctgggggcgtgtacactcggcgcacctgcgagactacagagcctcgggccggcacgtgtggggagtgtggacacgtctgctgcgccccgcttctcgctgctgaggggaagggagggggcgggcaggtgcagcggccgggctagtgggagggggcggcggccatggagcgggtgaacgacgcttcgtgcggcccgtctggctgctacacataccaggtgagcagacacagcacggagatgctgcacaacctgaaccagcagcgcaaaaacggcgggcgcttctgcgacgtgctcttgcgggtaggcgacgagagcttcccagcgcaccgcgccgtgctggccgcctgcagcgagtactttgagtcggtgttcagcgcccagttgggcgacggcggagctgcggacgggggtccggctgatgtagggggcgcgacggcagcaccaggcggcggggccgggggcagccgggagctggagatgcacactatcagctccaaggtatttggggacattctggacttcgcctacacttcccgcatcgtggtgcgcttggagagctttcccgaactcatgacggccgccaagttcctgctgatgaggtcggttatcgagatctgccaggaagtcatcaaacagtccaacgtacagatcctggtaccccctgcccgcgccgatataatgctctttcgcccccctgggacctcggacttgggcttccctttggacatgaccaacggggcagccttggcagccaacagcaatggcatcgccggcagcatgcagccagaggaggaggcagctcgggcggctggtgcagccattgcaggccaagcctctttgcctgtgttacctggggtggaccgcttgcccatggtggctggacccctatccccccaactgctgacttccccattccccagtgtggcatccagtgcccctcccctgactggcaagcgaggccggggccgcccaaggaaggccaacctgctggactcaatgtttgggtccccagggggcctgagggaggcaggcatccttccatgcggtctatgtggtaaggtgttcactgatgccaaccggctccggcagcacgaggcccagcacggtgtcaccagcctccagctgggctacatcgaccttcctcctccgaggctgggtgagaatgggctacccatctctgaagaccccgacggcccccgaaagaggagccggaccaggaagcaggtggcttgtgagatctgcggcaagatcttccgtgatgtgtatcatcttaaccggcacaagctgtcccactctggggagaagccctactcctgccctgtgtgtgggttgcggttcaagagaaaagaccgcatgtcctaccatgtgcggtcccatgatgggtccgtgggcaagccttacatctgccagagctgtgggaaaggcttctccaggcctgatcacttgaacggacatatcaagcaggtgcacacttctgagcggcctcacaagtgtcagacctgcaatgcttcttttgccacccgagaccgtctgcgctcccacctggcctgtcatgaagacaaggtgccctgccaggtgtgtgggaagtacttgcgggcagcatacatggcagaccacctgaagaagcacagcgaggggcccagcaacttctgcagtatctgtaaccgaggtttctcctctgcctcctacttaaaggtccatgttaaaacccaccacggtgttccccttccccaggtctccaggcaccaggagcccatcctgaatgggggagcagcgttccactgcgccaggacctatggcaacaaagaaggccagaaatgctcacatcaggatccgattgagagctctgactcctatggtgacctctcagatgccagcgacctgaagacgccagagaagcagagtgccaatggctctttctcctgcgacatggcagtccccaaaaacaaaatggagtctgatggggagaagaagtacccatgccctgaatgtgggagcttcttccgctctaagtcctacttgaacaaacacatccagaaggtgcatgtccgggctctcgggggccccctgggggacctgggccctgcccttggctcacctttctctcctcagcagaacatgtctctcctcgagtcctttgggtttcagattgttcagtcggcatttgcgtcatctttagtagatcctgaggttgaccagcagcccatggggcctgaagggaaatgaggcagctgctgtgtccccacggaaacaaccatctggggactgctgggaaatgctgtgaatgcggagggaagtgatgtttgggttctgtagctgagagatttttattcatttttaactgccccccaaccccactccaactccttctccaccacccattctcccaatggtctttagaaatagattttcatctgatattctgcagaaatatcaatgagacttggtatgggacaggggcagaaaacactacataggcctccaaggcaaaaccagtcccagtttctttaatgggaagaagctggaattcctggtgctcaattcttagtgaccccaatcctatacccaaatctatgatattctgggacctcagtgattttggtcccctcccacttctctagttcgtcatcctcccttcccatatccttcaaaagaaccacactagggtctccacctacttatacaatgcggatgcccaactgtttttaaggaagccagaagcatcccatggaccatggggtgagtgtcctccaagagccccctgagctcagccctctgcctggagggctccagacctttctgagccctgcttggaggcgagcattttcactgctaggacaagctcagctgttgaggacacccccaccccaaatttcagttcttacgtgattttaaccattcaacatgctgttgggttttaattctctaattattattattattgttattattttttaggaccagttgtagtgaattgctactgaaagctatcccaggtgatacagagctctttgtaaaccgcagtcacacattagggttagtattaaactttgtttagatgtaccataattaacttggctagttgattgtttgaagtctatggaagaaatagttttatgcaaaattttaaaaaatgccagtctggtcagggaagtagggggtttcaatgctgttgggaaccaggaaggtgggacagccggcaggtagggacattgtgtacctcagttgtgtcacatgtgagcaagcccaggttgaccttgtgatgtgaattgatctgatcagactgtattaaaaatgttagtacattactcta

SEQ ID NO: 1309 - DNA, 3535 bp, Homo sapiens
gcagtacacgggaggcttttaattccattgtggagaggacggcgttatttttattaactggaggcgacggcggctgcggcggcggcgggacccgcctcctccggggtatgaaaatcggcagtgggttcctgagtggcggcggaggtaccggcagtagcggtggtagcggctccggcggcggtggtagtggcggcggcggcggcggcggcagcagcggcaggagggcagagatggaacccacctttccccagggtatggttatgttcaaccaccgtcttcccccggtcaccagcttcacccggccggcggggtcggccgcccctcccccgcaatgcgtgttatcctcctctacctccgcagccccggccgctgagcccccccctccgccagccccggacatgactttcaagaaggagccggcggcgtcagccgcggccttcccctcgcagaggacctcctgggggttcttgcagtctttggttagcatcaaacaggagaaacccgcggatcctgaggagcagcagtcccaccaccaccatcaccaccaccactatggggggctgttcgctggagctgaagagaggtctccaggcctaggaggcggtgaaggggggagtcacggcgtcatccaggacctcagtattctccaccagcatgtccagcagcaaccagcccagcaccaccgtgacgtattactcagcagcagtagcaggactgatgaccaccatggcactgaggagccaaagcaggacactaatgtcaaaaaggcaaaaaggccaaagccagaatctcagggaatcaaagccaagaggaagccaagtgcatcttccaaaccttctttggttggagatggagaaggtgccatcctctccccaagtcagaaacctcatatctgtgatcactgtagtgctgctttccgaagctcctatcacctgcggagacatgtcctcattcatacaggagaaagacctttccagtgcagccagtgtagtatgggtttcattcagaaatacctactacagagacatgagaaaattcatagtagagagaagccatttggatgtgatcagtgcagcatgaagtttattcagaagtaccatatggagagacacaagaggacacatagtggagaaaagccatataagtgtgacacttgccaacagtatttttcaaggactgatagattgttgaagcacaggcgcacatgtggtgaagtcatagttaaaggagccactagtgcagaacctgggtcatcaaaccataccaatatgggtaatctggctgtgttgtctcagggaaatacaagttcttcaaggagaaaaacaaagtcaaaaagcatagctattgaaaataaggaacagaagaccggtaaaacaaatgaatcacaaatttcaaataatataaacatgcagagttactcagtagaaatgcctaccgtgtcttccagtggaggcataattggcactggaatagatgaactgcagaagagggtgccaaaattgatctttaagaaaggaagcagaaagaatacagataaaaactaccttaactttgtgtcaccattaccagacatagtaggacagaaatccttgtctggaaaaccaagtggctcacttggcatagtatcaaataatagtgtggagaccattggtcttctccaaagtacaagtggcaaacaaggtcagataagtagtaattatgatgatgccatgcagttttcaaagaaaagaagatatttaccaactgccagcagcaacagtgccttttctataaacgtaggacacatggtctcccaacagtctgtcattcagtctgcaggtgtcagtgttttggacaatgaggcaccattgtcacttattgactcctcagctctaaatgctgaaattaaatcttgtcatgacaagtctggaattcctgatgaggttttacaaagtattttggatcaatactccaacaaatcagaaagccagaaagaggatcctttcaatattgcagaaccacgagtggatttacacacctcaggagaacactcagaattggttcaagaagaaaatttgagcccaggcacccaaacaccttcaaatgataaagcaagtatgttgcaagaatactccaaatacctccaacaggcttttgaaaaatccactaatgcaagttttactcttggacacggtttccaatttgtcagtttgtcttcacctctccacaaccacactttgtttccagaaaaacaaatatacactacgtctcctttggagtgtggtttcggccaatctgttacctcagtgttgccatcttcattgccaaagcctccttttgggatgttgtttggatctcagccaggtctttatttgtctgctttggatgctacacatcagcagttgacaccttcccaggagctggatgatctgatagattctcagaagaacttagagacttcatcagccttccagtcctcatctcagaaattgactagccagaaggaacagaaaaacttagagtcttcaacaggctttcagattccatctcaggagttagctagccagatagatcctcagaaagacatagagcctagaacaacgtatcagattgagaactttgcacaagcgtttggttctcagtttaagtcgggcagcagggtgccaatgacctttatcactaactctaatggagaagtggaccatagagtaaggacttcagtgtcagatttctcagggtatacaaatatgatgtctgatgtaagtgagccatgtagtacaagagtaaagacacccaccagccagagttacaggtaaggtcccaaaagtggccaggctggaggtcttctaatgtaattttgttttattttgagaacactgccattggaatgtttctacacgatcctattaagaataatgtgatgccctttcaatgcaacttttcatatttagtttattttgttagcgtgattttagctctgtttgtattatgatttttaatcaaaatcaatagattaaaaatagtttgacattcaaagtgacaatgtttagcaatcaaatttacatgtatagatcgtcagggaatagcccaaatgttttaaacgcaaaaaaaaagacaaaaaaaaaccaaaaaaaaaaaacctacaaaaaaaactttgttgctaggattaaggttattctaattgctttactctcaggaaagtgtaataacgcatgggaattctgtacgttatcactgtaatggaatatccaatttacagatagtatgatatacatttcatcatttaagtaagggatcgaaaacatttcaaattgctctatctgggctgatagacatttcgtcatttaagtaagggatcgaagacatttcaaattgctatctccatctgggctgatccaaaattctgagattgttggctacctatattttgttgcagcttttaaatgtactctgaacttccaaaccacattcattccagcctggtagaacaaatattcttggatctttgatcaaagcctggaatgatagctttaataaaagaaaaaaaaaaaaaaaa

SEQ ID NO: 1310 - DNA, 3737 bp, Homo sapiens
acccacgcgtccggccgccgaaggggactgtttgctcctacgggctgtagatggagctgtccggccccggagagggggaaggcgcctggaaaacgttcttcttctccctggccgacccgagcggggaacagcactcccaggatgcagtttgtgtcaacacggccgcagcctcagcagctgggcatccagggcctggggctggacagcgggagctggagctgggcccaggctctgcccccggagcaggtctgccaccaggagccggcgctgcgcggggaaatggccgagggaatgccgcccatgcaggctcaagaatgggacatggacgcccggcggccaatgccttttcagttcccaccctttccagatagggcacctgtcttccccgaccgcatgatgcgagagccccagttgcccacagcagagatctcactctggactgtggtggctgccattcaggctgtggagaggaaggtggatgcccaggccagccagctgctgaacctggaggggcgcacggggacagccgagaagaagctggccgactgtgaaaagacggccgtggaatttgggaaccacatggagagcaagtgggccgtgctggggaccctgctgcaggagtacgggctgctgcagaggcggctggagaacttggagaacttgctgcgcaacaggaacttctgggtcctgcggctgcccccgggcagcaagggggaggcccccaaggttccagtgacttttgtcgacattgctgtgtacttctccgaagacgagtggaagaacttggacgaatggcagaaggagctttataacaaccttgttaaggagaactacaaaaccctcatgtccctggacgcggagggctcagtccccaagccagatgctccagtccaggctgagcccagggaagaaccttgtgtgtgggagcagcgccaccccgaagagagagaaatcccaatggatcccgaagcaggagcagagcccctggtgcctgcgcaggatgcgtcctcccaggtgaagcgtgaggacaccctgtgtgtccggggtcagcggggcctggaggaaagagccatccctacggaatccattaccgactccccaatttctgcccaggacctcttgtcccggattaaacaggaggagcatcagtgcgtgtgggatcagcaggatttggcagacagagatattcccacggatcccaattcagagtctctcatctcagcacatgacattttgtcatggatcaagcaggaggagcagccatacccatggggaccacgcgactcaatggacggagagcttggattagactctggccctagtgacagcctgctgatggtgaagaacccacccccggccccgccacagccccagccccagcgccagccaccgcagccgcagctgcagtcgcagccccagccccagagcctgccccccatcgcggtggccgagaacccgggcggccccccgagccgagggctgctggacgacggtttccaggtgctgcccggggagcgtggctccggcgaggcgccgccgggtggggaccgcagcaccgggggcggcgggggcgatgggggcggtgggggcggcggcgcggaggcggggacgggggcaggcggcggctgtggcagctgctgccctggcgggctgcggcggagcctcctcctgcacggcgcccgcagcaagccctactcgtgccccgagtgcggcaagagcttcggcgtgcgcaagagcctcatcatccaccaccgcagccacaccaaggagcggccctacgagtgcgctgagtgcgagaagagcttcaactgccactcgggcctcatccgccaccagatgacgcaccgcggcgagcggccctacaagtgctcggagtgcgagaagacctacagccgtaaggagcacctgcagaaccaccagcggctgcacacgggcgagcggcctttccaatgtgcactgtgcggcaagagcttcatccgcaagcagaacctgctcaagcaccagcgcatccacacgggcgagcgcccctacacgtgcggcgagtgcggcaagagcttccgctacaaggagtcgctcaaggaccacctgcgcgtgcacagcggcggcccgggccccggcgccccacggcagctcccgccgcctcctgagcgagactagggctgggctgggggagggcagggccggacggagtggatcgggggcggcctgagcaccaaccaccttgccgggtgtcctcagccaccgtctggaaatcggcaacaggcattgcactccggttgggggtcccccagggtggggcagggatcccccagatctgtctggtctgaatggacgcccagctcatctagggtggacccagctgctggggaagagccagggggaccgcgaggagccgagcgtcctcgggcaccgccctcacacctcctcgagtgccctgggaccactgggccacagatggtcatcaggggaagccaccagggagtcccgaagcccttctgagatcaggaaatcaggtcccaaggttaggagacgccctgaaaaaaagtgaaggccgagggatgtgctaagggtaacaccttcatgatgacaacactgcctcgcgtttcaatagcgctttatacttttttaagtgttttctatccgttatccatttcacccttggcctatccctctcagataggtggggtaggattttcctggtgaccgagtaaagtgagaggcaggtgagacggttcacccaatcacacgggaaggggcgcgcgctgcccaaccgcgctctccgcctacctcgctgctcgggaagctgctggcctggccctcctggtctctcttcctttctggtctctcttcctttccttgctctcacccacggataaaaccagaagcgacaggaggccagctcctggggttcctgggaccgggaacagattggctacggaacgccccaggttgtacattcagagggctctttctccatgggagctcctggtgccgccttcggccccagcctgtccccagcccctcaatctggtgcagcagcatcttgtcactgcacaacagtggcctggtcccccacaggcagttagggccccaggtcagacctcaccatgatgatttgttccagttctcccagggcagaggggcgagggagaggcttttgctgtgagagtagccgtcacgtgtctcttcccagcagcgccgggcaagtgggtgctagagtctgagcctcaggctctcctgccctgggcctcccaattggtgctatctgttactgcccgtgctcacggacatggatacagaccctgctgtgctccacaccctgcaggcgcctcgggaagcgcccaaaggattccccttcacgttggtgcacctgctccatagctccgggcgctgcgtcccgaggggccacagtctccatttcagcgtcttgcatggcctggcaccgggtggggtggtatgcccccttgtttgtgtcaaaaatgactttccctgcccttgccgtgggtccggcgttcctcccagccgggatcacagtgggcagccggcacccggcaccactttggcgagcgtcctgcttccgccctcgccctcatctacgctgctccgctttcctcagacccctttttgccgtgcaaaggaattcttgacattaaataaaaggtatccagattgcagactgcatgttcacagagctgggggttctccagcttgcctacagtaaagcctcaatgaactgg

SEQ ID NO: 1311 - DNA, 5559 bp, Homo sapiens
cttcgatcgtccgattctcccagccgcaccacgggtgctcccacctgcggagaaccggagtctggcgatgccaaggcgcttctgggaattgtagttccgggcgggatgagggcagcacgcctggctccgctccttcttacgcatgcgcgactccgagctggccaaagaagttcgtcccctttgtgaggcccgggatgggaggtgcccggttcccccagggacagcttcaagcggtagggacagacatctgaggacccagcctcagggatgctgtccccgggcttccaggctccagcgccgtaggactgaggcagactccacggtgagaaagagacccgatctaacccaggcctttcatcagagcccaggagggaaggcaggaagtgggaccacgaggcccggggggcttctaactcgtctggccagggagatctgaattggggtgaagagcagaatctccagaacaaggaggaggtggtgatcatggagacagatttggctgaaatgcctgagaaaggagctctgtcttcccaggattctccccatttccaagagaagagcacagaagagggagaagtggctgctctgcgcctcacggccagatcccaggaaacagtgacattcaaggatgtggccatggactttacaccagaggagtgggggaagctggatcctgcacaaagggatgtgatgctggagaactataggaacctagtctcactttggcttccagtttccaaacctgagagctacaacttggagaatggaaaagaaccattgaagcttgagagaaaagcccccaaaagcagctattcagacatggagactagaccacagagcaaggattcaacttcagtgcaagatttttccaaagcagaatcatgcaaagttgcaataatagacagactgacacggaatagtgtctatgactctaacttggaagcagcccttgaatgtgaaaattggttagagaatcagcaaggaaatcaggagagacatttgagagaaatgttcactcacatgaattcactctctgaggaaacagaccataagcatgatgtatactggaaaagcttcaatcagaaatctgtccttatcactgaagacagagttcccaaaggatcttatgccttccatacacttgaaaaaagcttgaaacaaaaatcaaacttaatgaaaaagcagagaacttataaagagaaaaaacctcataaatgtaatgattgtggtgaactcttcacctaccattcagtgcttattcgacaccagagagtccatactggagagaaaccctatacctgcaatgaatgtgggaaatcttttagccacagagctaatttaactaaacaccagagaactcatactagaattctctttgaatgcagtgaatgcaagaaaaccttcacagaaagctcatcccttgcaacacatcagagaattcacgttggagagagaccttatgaatgcaatgaatgtgggaaaggttttaatcgaagtacacatcttgtgcagcatcagttgattcatactggagtgaagccttatgaatgtaatgaatgtgataaagcttttattcattcatcagcactcattaaacatcaaagaactcatactggagagaaaccttataaatgtcaagaatgtgggaaagcctttagccattgctcatccctaactaagcatcagagagttcatactggagaaaagccatatgaatgcagtgaatgtggaaaaacttttagtcagagcacacatcttgttcaacatcagagaattcacactggagagaaaccctatgagtgtaatgaatgtgggaaaaccttcagccggagctccaattttgctaaacatcaaagaattcatattggaaagaaaccgtacaaatgtagcgagtgtggaaaagccttcattcattcatcagctctcattcaacatcagagaactcataccggagagaaaccctttagatgtaatgagtgtgggaaaagctttaagtgcagttcatctctcatcagacatcaaagagttcacactgaagagcaaccctgaaaaattactgaatgtgaagaaatgtaagttggttttatcactgtattaaatacttgagtgtttaggtggaaggcgcatccataatatgcatgtgaggaccaattctgtatgcatctaatttcatttgcgtaatacatagttttgagccataagcaggttctttatgtccgttaatttgataattatgaaatctagccagcgatttcaaaattttaatctccaacgtcccaaatagctatctgtggaaattcaagaagtccctgagagtaggtagcagtacgaacattgtgaaatccagttttcccctctcttgtttatgtcagagctttgttgtaagcctctcactttgtaaggaaattcttattgggtaggttaggctgagggcttacatccttatcatcaggaagacacaatgttgttatttattactccttgagatctagatacacatatggtataattcatctagagtgtaatttcttttatattagccttaaaaaccaaaaatgctgggttcaaagtccttagaattcccttcctccctcaacaagctgctgtctatgttgatgaccataactgggatgtataatatttacagacaactctaagttacgttcacatggattatgtacatcattgatttttttttttttttttttttgagacagagtcttgctctgttgcccgggctggagtgcagtggcgcgatctcggctcactgcaacctccacctcccaggttcatgccattctcttgtctcagcctcccaagtagctgggactacaggcacctgccagtacgcctggctaattttttttgtatttttagtagagatggggtttcaccatgttagccaggatggtcttgatctcctgacctcgtgatctgcctgcctcggcctcccaaagtgctgggattacaggcatgagccaccatgcctggcatcatcattgatttatgtcattgttatccctctaccgcggagaccttctttcattttccatttccctgggagttcacgtgaagtagtgaatgggtcaaaatcttaacagtggttgttgatcaagtccttcctttcttatccttggcactgaataaatctttggttttccataatcaaagggtgagggagacttcttttgtctacattattcagctttctgaaagctatgctgtgtccatttgagaaaaagccccagggatattgaaggtctgagaagttgagtggttcagtgtgttattatatttagggtcccagtaaagaagaactgaagcaactgtgagacaccagggcatacttccctgtatgagtggaaaacaaggcacggaaaatagctcacaggatagtcctcaactgacttgcttgaggataagcagcttcccttcgtgaagaagttgccatttctctggccttcatatttatctactttttgttattgttgtctgtatcggttcaatctcacactgctataaagaaatgcctgagactgggtaacttataaagaaaaaaggtttaattggctcatggttccatgggctgtacaggaagtatgactggggaggtctcagggagcttttactcatggcaaaaggcaaagccagagcaggtatcttcacagggctagagcaagaggaaaagagagaggggaggtgctacacactttttatgcaaccaaatctcatgagaactctatcacgagacagcagtagggggacagtgctaaatcattcatgagaaactacctgcgtggtccagtcaccttgcaccaggccccacctcccacattggggattacaattaaacatgagatttgggtggggatacagatctaaactgtatcattactcaaaaaaaaaaaaaaaaagaaagaaaagaaaacacaggaaaaggaactcacctcttttatcatcttagtatttagtactaatggtttagagcaggaattgacaaactgtggcctggactcatggaccaactctggcccaccacctgtttctcagaagaaaattttattggaactcagccacacttactcatttacatgttgtccttgactgcctttgtgtccagtgtcagaactgagtagctgcagcggaggttgtgcctctgggctttaatatcacaaacagagcagcttataagcaacagaaacttacttctcacagttttggaggctgggaagtccaagatcaaggtgtcaacatatttagggtctagggaaggtctgcttcttggttaatagaaagcacctttcactgtgtcttcacatggtagaaggggagagctctggtatcttcagccccttataagggcactaatcccattcatgagagctccaccctcacgacctaatcacctccaaaaggccccatttcgtaataccgtcagttaagtttcattatatgactttgatggggatatagcccatagtaggttgtatgtccctgaaagcctaaaatatttactgtttggctctttacagaaaatattttcttggcccctgttccagagcattcatcaagtcagataaagggtttaaaccagtcagagaaactaggtggaatggaaaagtactgagagataattggggacagaaaaataaaagagatgggaaatgctgcatcaaaatactcctacctctaggatgttactatatattgttaggagaattcaagttattgaaacttgccaaattcttgagtgaagaggaattcatttgagagccaaaatttgactaaggaaagaagaccaacatgggctttccaaagttgagtttgaattctgccatccccactaagcagtcatgtgaccttggaaaaactccctactctgagtctcagtttctttatctgtattaggtttcaacaaagggaataaatcattggcttctcatgaggttgtcataaggattaaataagacaatgcatataaaagaactggcagacaataaatatagagtcccccactcctgcttggtgctctctttctctctccttctctacatagagaagtgccagagcatccgtcagtagaagttacttaaggttggctgtgtcttccacatcttttgtttacccatgaagaactgtgaccatcttgttctgtgtcttgtcataaagatgggacgtgacttctttctgctcttgcttccatctggtgctgttttctgcacagcctccttgagaccttccagaaccttcttttttcctacttcatatcacttaaccagtagctatctgggatggttccagaggctgaagtttgcagttgaataacattttaaatagtgttaagcgacttgggatctctggccctttgcgtttcagtatttgtcctttttatgcctgatgtttaacctgccacatgtttgtactgcaacatgaatcttggaaattttaatgttatgcatttcaaatgtttttggttatctgtaaactaaatgtgcccttattggctcacttgtcaataaagatgtttgtatatgtattgtcagaaaaaaaaaaaaaaaa

SEQ ID NO: 1312 - DNA, 4278 bp, Homo sapiens
gcagtgacgccgaggcgaggtcgcggctaagcagaggcgccggggtttctgggccgggcttctcaggaccgggctggaacgtgcagctcctggccgggacactctgtgctttgcggggaagggaagtggcggagcccgaggatccgctgccgctcgggactgagcccgccacgcaggcgcctgtgccagcgtcgccattgttgcctgtggccttagggccgctccggctgcccgtcggccgggtcccagcgacagggtctcttatccatccctgcaagttctgggctcagaatttgtcactaaggctgctaactctaccttgattctgttctgccctcggctgcagcagcctttgatatagtgtccttgtgactctagcatgagacttcaagcagttggctcactactggagaaataaaggatattgccagattgactctcctgtctgtagcaatgttagcctcaagcaagaggatgaacagttcttcacgttctcaaatccttctaaggtggaagtcagacaaggctcagagtggaccctacaatgttgagaaggaaatccttacttcaagattcttgcgtgacactgagacctgtcgacagaattttaggaattttccatacccagacctggctggtcctcgaaaggcattgagtcaactccgagagctctgccttaagtggctgagacctgagattcactcaaaggaacaaattttggagctgctggtgctggagcaattcctgaccatcctgcctggtgaggttaggacttgggtaaagtcccagtatccagagagcagcgaggaagcagtgactctggtggaggatttgactcagattctagaagaggaagctcctcaaaactctaccctttcccaagataccccagaggaagaccccagaggaaaacatgctttccagacaggatggctaaatgacttggtgaccaaagaatcgatgacattcaaagatgtggctgtagacatcacccaggaggactgggagttaatgcgtcctgtgcagaaggaattatacaagactgtgacgttacagaactattggaacatggtttctctgggacttacagtgtacagaccaactgtgattcccatattggaagaaccatggatggtgataaaagaaattttagaaggccctagtccagaatgggaaactaaagcccaagcatgtactccagtggaggatatgtctaaactcacaaaggaagaaacccataccatcaaattagaagactcatatgactacgatgatagactagagaggcgaggaaaaggtggcttctggaaaattcacactgatgaaagaggtttcagtttgaagtcagtcctttcacaagaatatgatcctacagaagaatgtcttagtaaatatgatatatatagaaataattttgaaaagcattcaaacctaattgtacagtttgatacccaattagataataaaacttctgtgtataatgaaggcagggcaaccttcaatcatgtctcatatggtattgtacataggaaaatacttcctggagagaagccttacaagtgtaatgtgtgtgggaaaaaatttaggaaatacccatccctcctgaaacaccaaagtacccatgccaaagagaaatcgtatgaatgtgaagaatgtgggaaagagtttaggcatatctcatcccttattgcacatcagagaatgcacactggagaaaaaccatatgaatgccaccagtgtggtaaagccttcagccagcgtgcacaccttactatacatcagagaattcatactggagagaaaccctataagtgtgatgactgtgggaaagacttcagtcagcgtgcacaccttaccatccatcaaaggacacatactggagagaaaccatataaatgcttggaatgtggtaaaaccttcagtcatagttcatcactgattaatcatcagagagttcatactggagaaaaaccttatatatgcaatgaatgtgggaagactttcagtcagagtacacaccttcttcagcatcaaaaaatacatactgggaagaaaccatataaatgcaatgaatgttggaaagtgtttagtcagagtacttaccttattcgacatcagagaattcattctggagagaagtgttataaatgtaatgaatgtggaaaagcctttgctcattcctcaacccttattcaacatcaaaccactcacactggagagaaatcctatatatgtaatatatgtgggaaagccttcagccagagtgcaaatcttactcaacatcatagaacacatactggagagaaaccatataaatgcagtgtgtgtgggaaagcattcagccagagtgtgcaccttactcaacatcagaggattcataatggagaaaaaccctttaaatgcaatatatgtgggaaagcatatagacaaggcgcaaatcttactcagcatcaaaggattcatactggagaaaaaccctataaatgtaatgaatgtgggaaagctttcatttattcctcatcacttaatcaacatcagagaactcatactggagagagaccctataaatgtaatgaatgtgataaggattttagccagagaacatgccttattcaacaccagagaattcacacaggagagaaaccctatgcatgtcgtatatgtggtaaaaccttcacccagagtacaaaccttattcagcatcaacgtgttcatacaggtgccaaacatcgtaattaatggataagggaaacttcaattcggttttacaactttgtttcaattttgttttgtgcattctatgtgtcagaacattcagaagaagtctgaagaagtgcaatatgttagatactcagcagaagtatcagaagtagtggtatggatataacctatttagatttaatgtgaaatttaagaaggaaacttgacttcttaaccttaatttgatatgattttaattcattacagaaagaaaccctgtgaagggtattcaaaaacataactcatcaactctctatttcaagtacacttatcctttggtatactcgggggattggttccaggaccacccatgtatacgaaaatctacccatactcaagttgcacggtcagcctggtggaacctgtgtatatgaaaagccctacatctatgcaggtttcccatccctgaataatgtgctttcaaactctgttcagttgaaaaaaaaaattccagtataaatggatctgtacagttcaaatgtgttgttcaagggtcaactgtacatcctaatgaggccttatgagtgtaacttaggaaggtgtccatcaaatagagatttcacactagagagtgatcttaaaattacagaaaagagtaagctgctttcaggccttttattcccagctttgaagccttaaaatatgtaaaggactcccttccctgttttacttccccttctcctgttatgccataactgccatatggagccagtaggtttgaaaaaaaaacagttggaagtatcttaaagatttctatgtgaccactggttacaccttccctcagatatggaaatattaaagagaagcttaatgaaagatatgttatgatagaaactaatgtgtatataacattagatgtgtagagatttagttaaacaggcaaaaattaaatgcctcaagcttaaatgaattttcaatacacattagccttgatttcactaggttttgacattcaaggtcatcctgaaggaaaaaagtaggtataaagtatacagttcccatttttttcacctgactcctaaatttatactttaggtttctctgtgactgttttactatggaaagttcatttcttccactgaaacacgtttcttgagtgtctactatgctcaggtcccaaacttcctaattggatcctctcaagcttgttacagtgctgaaaatcacaggtggtttacacaacagaaagatttctagagtgatgagaaagtgaggatgtgatattttgtcatgggttgagcataagcaacctgctaaaatgggttgccaaatgctacctatatcccaagagaaggaagtggaagtgatagtgtagctatataaataatgtgagaaaaaaatggaaaatagatctgaattcactgcagaatgtgggtcggggaaaaggtgaaattttagtggagtgaggaaaacatacatagataattgctataacatgaaatgtaattggacttgctttgcctatgaaatgagagtggctaaataaaaaagaattcagcctggttattagaagaaact

SEQ ID NO: 1313 - DNA, 3541 bp, Homo sapiens
gaagaagtaggggcggggggaagtttaggagttgaggaaagaagattaaagagcgcgaggagacaaataaaaagaagtgttaagaattgcctttgggactctgaaggctgaagaattgatgaattgcaagtttgtgccccatagctgcacagactgcctgaagttacatttagagactgaaatcactgcaccttaaaaacaaaagattgagctgcactgtattcctaatgtttcatcattactaacaggatattcctcatgacattgctgtctgatctttgaccatcagtctgtgacctgccccttctctttacatgcagccgctctctgctccctgccccaatgaacatctgcactaggcccaagccttggagtaatttacctgaagagtgacaccattgattttgaaactactgaagaaacccaagacagctgaaaaccagaaggcatctgaggagaatgagattactcagccgggtggatccagcgccaagccgggccttccctgcctgaactttgaagctgttttgtctccagacccagccctcatccactcaacacattcactgacaaactctcacgctcacaccgggtcatctgattgtgacatcagttgcaaggggatgaccgagcgcattcacagcatcaaccttcacaacttcagcaattccgtgctcgagaccctcaacgagcagcgcaaccgtggccacttctgtgacgtaacggtgcgcatccacgggagcatgctgcgcgcacaccgctgcgtgctggcagccggcagccccttcttccaggacaaactgctgcttggctacagcgacatcgagatcccgtcggtggtgtcagtgcagtcagtgcaaaagctcattgacttcatgtacagcggcgtgctacgggtctcgcagtcggaagctctgcagatcctcacggccgccagcatcctgcagatcaaaacagtcatcgacgagtgcacgcgcatcgtgtcacagaacgtgggcgatgtgttcccggggatccaggactcgggccaggacacgccgcggggcactcccgagtcaggcacgtcaggccagagcagcgacacggagtcgggctacctgcagagccacccacagcacagcgtggacaggatctactcggcactctacgcgtgctccatgcagaatggcagcggcgagcgctctttttacagcggcgcagtggtcagccaccacgagactgcgctcggcctgccccgcgaccaccacatggaagaccccagctggatcacacgcatccatgagcgctcgcagcagatggagcgctacctgtccaccacccccgagaccacgcactgccgcaagcagccccggcctgtgcgcatccagaccctagtgggcaacatccacatcaagcaggagatggaggacgattacgactactacgggcagcaaagggtgcagatcctggaacgcaacgaatccgaggagtgcacggaagacacagaccaggccgagggcaccgagagtgagcccaaaggtgaaagcttcgactcgggcgtcagctcctccataggcaccgagcctgactcggtggagcagcagtttgggcctggggcggcgcgggacagccaggctgaacccacccaacccgagcaggctgcagaagcccccgctgagggtggtccgcagacaaaccagctagaaacaggtgcttcctctccggagagaagcaatgaagtggagatggacagcactgttatcactgtcagcaacagctccgacaagagcgtcctacaacagccttcggtcaacacgtccatcgggcagccattgccaagtacccagctctacttacgccagacagaaaccctcaccagcaacctgaggatgcctctgaccttgaccagcaacacgcaggtcattggcacagctggcaacacctacctgccagccctcttcactacccagcccgcgggcagtggccccaagcctttcctcttcagcctgccacagcccctggcaggccagcagacccagtttgtgacagtgtcccagcccggtctgtcgacctttactgcacagctgccagcgccacagcccctggcctcatccgcaggccacagcacagccagtgggcaaggcgaaaaaaagccttatgagtgcactctctgcaacaagactttcaccgccaaacagaactacgtcaagcacatgttcgtacacacaggtgagaagccccaccaatgcagcatctgttggcgctccttctccttaaaggattaccttatcaagcacatggtgacacacacaggagtgagggcataccagtgtagtatctgcaacaagcgcttcacccagaagagctccctcaacgtgcacatgcgcctccaccggggagagaagtcctacgagtgctacatctgcaaaaagaagttctctcacaagaccctcctggagcgacacgtggccctgcacagtgccagcaatgggaccccccctgcaggcacacccccaggtgcccgcgctggccccccaggcgtggtggcctgcacggaggggaccacttacgtctgctccgtctgcccagcaaagtttgaccaaatcgagcagttcaacgaccacatgaggatgcatgtgtctgacggataagtagtatctttctctctttcttatgaacaaaacaaaacaacaacaaaaaacaaacaaacaaaaaagctatggcactagaatttaagaaatgttttggtttcatttttactttctgtttttgtttttgtttcgtttcattttgtactacatgaagaactgttttttgcctgctggtacattacatttccggaggcttgggtgaataatagttttcccagtctccctcggatggtggccttaaggcctggtagtgcttcaagaggtccactggttggatctctagctactggcctctaaatacaacccttctttacaaaaaaatcttttaaaaaaaagtaaaaaaaaaaaaaaaatttccacttgtgaagagcactacaaaaaatatataacaaaatctaaaaggcctactgtctttaagtacaccgcttgcagtgtttcagtggacattttcacaattctggccgcttggacttcacagtaaccagttaaaactgtggaatatcacttctggttgaaaacccagaggaaaggccctgctgttttccacctaccacgttgtctgatttcataaaagggctgtgggggtgggaagggcagtgggttcggtggtgtgggaaagaaagacgaatggcaggcttcttccccagattctgcccgggtccacacaccctggcccaccttctccatatccccctcttgcagcagaagccaggaagacttggacaagcaacaagcaacagtggctatcgtatttattcagtgtcttcgctgagccacagcctcagcacaatcaagagggactttcatgaaaggcaggaatgcagataaaacaaagatatcagaaatttgcacctatgtttctaggtacaagagaaggattatttccaacaatctttgcaaaaaaaaaaaaa

SEQ ID NO: 1314 - DNA, 168 bp, Homo sapiens
tacaagtgtaaagaatgtggtgaagccttcagtcagagctcaactcttacaaaacatataaaagtctacactggagagaaaccctacacctgtaaagactgtaggaaagccttcagccagagttcatctcttacccagcatcagagggttcatactggaaagaaacca

SEQ ID NO: 1315 - DNA, 7650 bp, Homo sapiens
aaccggggtctgagtgctcagagtacagctgcaaccgcgaccatgggcgggaagaacaagcagcgaactaaagggaacctgaggccttcaaacagtggccgagctgcagaactccttgccaaagaacagggaacagtgcctggatttattggttttggaacatctcagagtgacctaggctatgttcctgctattcaaggagctgaagaaattgacagtcttgtagattctgatttccgaatggtgctgcggaaactttcaaagaaagatgtcaccacaaaattaaaagctatgcaggaatttggaaccatgtgtacagagagagacacagaaactgtgaaaggagttcttccatattggccaagaattttttgcaaaatttcacttgatcatgaccgtcgcgtccgagaagccacacaacaagcttttgaaaaacttatccttaaagtaaagaaacagttggctccctacttaaaaagtttaatgggatattggctaatggctcagtgtgatacttacacaccagctgcgtttgcagcaaaagatgcatttgaagcggcttttcctccaagcaagcaacctgaagccatagcattttgtaaggatgaaattacaagtgtgctgcaggatcatcttataaaagaaacacctgatacactcagtgacccgcaaactgttccagaggaagaaagagaagctaaattctaccgggttgtaacttgttccttattggcattaaagagattactttgccttttacctgataatgagcttgattctctggaggagaaatttaagtctcttttatcacagaataagttttggaagtatggaaaacacagtgtacctcagattcgctcagcttattttgagttagtctctgcattgtgccagcgcattccacagttgatgaaagaggaagcatccaaagtgagcccatcagttctacttagcattgatgacagtgacccaattgtctgcccagctctctgggaagctgtactctatacacttacaactattgaggactgttggcttcatgtaaatgcaaaaaagagtgtgtttcccaagctatcaactgtgattcgtgaaggtggtcggggtctagctactgtcatatatccttaccttctgccattcatcagcaagctccctcagtccatcacaaatccaaagttggatttcttcaaaaatttcctcacgtctctagttgctgggctgtcaacagagagaactaaaaccagctcttcagagtcctcggcagtaatatctgctttttttgaatgcttacgttttataatgcagcaaaacttaggtgaggaagagattgaacagatgctcgtcaatgatcagttgatcccttttattgatgcagttctcaaagacccaggattgcaacatgggcagctatttaaccatttagcagaaactctaagttcctgggaagccaaagcagacacggaaaaagatgaaaaaacagctcacaacttggagaacgtactgatacatttctgggaaagactgtcagagatctgtgttgcgaaaatcagtgagccagaagctgatgttgagtccgttttgggtgtatctaacctattacaggtgcttcagaagccgaagagctcattgaagtcaagtaaaaaaaaaaatggtaaggttagatttgctgatgagatacttgaaagcaataaagagaatgaaaaatgtgtatcttcagaaggagagaagattgaaggctgggaattaacaactgaaccttctctcactcataattcttcaggccttttgtctcctctaaggaaaaaacctttggaagacttagtctgtaaactcgcagatataagtattaattatgtcaatgaacgaaagtcagagcaacatctaaggtttctttctactctgcttgactccttttcttcaagccgagtatttaaaatgctacttggtgatgaaaaacagagtattgtccaagccaaacctcttgaaatagccaagcttgtacaaaaaaatcctgcggtgcagtttttataccagaaactgataggttggctaaatgaagatcaaaggaaggattttggtttcctggtggacattttgtacagtgctctccggtgctgtgacaatgatatggaaagaaaaaaagtcttggatgatctaaccaaggtggacttgaaatggaattctcttcttaagattattgaaaaggcatgtcctagttcagataaacatgctttagtaactccttggctcaaaggcgatatccttggtgagaaattggtcaacttggcagattgtctttgtaatgaggacttggaatccagggtatcttcagaatctcacttctcagaaagatggactcttctaagcttggtattatcccaacatgttaaaaatgattacttgattggagacgtatatgttgaaagaatcattgttagacttcatgaaactttattcaaaacaaagaaattatcagaagctgaaagcagtgactcatcagtgtcttttatctgtgatgtggcctataactatttcagctcagcgaaaggatgcttgctaatgccatcatctgaagatttattattaactctctttcagttatgtgctcagagcaaagaaaaaacacatttgccagattttcttatctgtaaactgaaaaatacttggctctctggtgtaaatttattggttcatcaaactgacagttcatataaagagagtaccttcctacatttgtctgctctgtggctgaagaaccaagttcaggcttcatctttggatatcaacagtctccaagtcctcttgtctgctgttgatgatttgctaaatacacttctagagagtgaagattcttatcttatgggagtttatattggaagtgtaatgccgaacgacagtgaatgggaaaagatgaggcagtctcttcctatgcagtggttacatagacctcttttagagggaagattgagtttgaattatgaatgtttcaaaacagattttaaggaacaggacataaagacacttcccagccatttgtgtacttcagcattattgagcaaaatggtcttaattgcactgagaaaggaaacagtcttagaaaataatgagcttgagaaaataattgcagaactgctttattcactgcagtggtgtgaagaattagataacccacctatttttctaattggattttgtgaaatacttcaaaaaatgaatattacgtatgataacttacgtgtacttggtaatacgtcgggccttttgcagctgttatttaacaggtccagagaacatggcacactgtggtctcttattattgctaagttgatcctttcccgaagcatttcatctgatgaagtaaaaccacattataagagaaaagaaagtttttttccactaactgaaggcaatttgcataccattcaaagtctatgtccatttttgtcaaaagaagaaaagaaagaatttagtgctcaatgtatacctgctcttttgggctggactaagaaagatctttgcagcactaatggaggttttggacatcttgccattttcaattcttgtctgcaaaccaaaagtatagatgatggagagctattacatggaatattaaaaatcataatatcctggaagaaagagcatgaagatatttttcttttcagttgtaatctatcagaagcaagtccagaggtactgggtgtaaatatagaaataatccggtttctttccctatttctgaaatactgctcatcccctttggcagagagtgagtgggacttcatcatgtgctccatgttggcttggttggagacaacaagtgagaatcaggcattgtattctattccacttgtgcaactgtttgcctgtgtcagctgtgatttggcctgtgacctcagtgctttctttgattccacaactctggataccattggcaatcttcctgtaaatctaatcagtgaatggaaagaatttttttcccaaggcatccacagtttgcttttacctattttggtgactgttacaggagaaaacaaagatgtgtctgaaacatcctttcagaatgcaatgctgaaacccatgtgtgaaacattaacgtatatctcaaaggaacagctattgagtcacaaacttcctgcaagattagttgctgaccaaaaaacaaacttaccagaatatctccagactttgttaaatacattggccccattactcctcttcagagctaggcctgtgcaaattgctgtttatcatatgctatacaaattgatgcctgaattaccacagtatgatcaggataatctaaagtcatacggagatgaagaagaagagccagccttgtcaccaccagcagcactgatgtctcttcttagcattcaagaggacttactagaaaatgttttggggtgtattcctgttggacagatagttactattaaaccactgagtgaagacttctgttatgttctgggataccttctcacttggaaattaatactaactttcttcaaagctgcatcatcacagcttcgggctttgtattccatgtatcttcggaaaacaaagagtttgaataaattgctctatcacctgttcaggcttatgccagaaaatccaacctatgcagagacagcagttgaggtcccaaataaggaccctaaaacattctttactgaggagctccagctgagtattagagaaacaacaatgcttccataccacattccacacttggcttgttcagtctatcatatgacattaaaagacttgcctgccatggttaggttgtggtggaatagcagtgagaagcgtgttttcaatattgtggatagatttacaagcaagtatgtcagcagtgttctttcttttcaagaaatatcttctgtacaaacaagtacacaactatttaatggcatgacggttaaagctcgagctactactcgagaggtaatggctacttatactattgaggacatagttattgaacttataatacaactgccttcaaattatccactgggttcaataatagtagaaagtgggaaaagagtaggagtagctgttcagcagtggcggaactggatgctgcagttaagcacttacctcacccatcagaatggaagtattatggaaggcttagctttatggaaaaataacgtagacaaacgttttgagggtgttgaagattgcatgatctgtttctcagtcattcacggtttcaactattcccttcccaaaaaagcctgtagaacatgcaagaaaaaattccattcagcctgcttgtacaaatggtttacatctagcaacaaatccacttgtccactgtgtcgtgagacgtttttctgagatttttttcactggaagggatccctgaagtacatcaaacaaaggcattggatttggatccgtctgaaagtgtggatgtggggaagccagtgagcattacttttaaataggaccttctctggaaaattattttggttaatgtaataatcctaaaatcaggtttacttaactttagattgctttgtaaatgtttggaaactttcttttacaaaagaatattacatatttgagagaaaatatttctattaatggtttaatttctttgtatatttaaaaataaatatgaaaaacccctaaattacagaattggaatttgtgaaaagattgcacaactatattattgataaacccattccgtttgttgatctgtgttttagaatagtccaagtgaagcaaaacgaactgagagagctgatttacatctatagatattttaagccttatttattagttatgacaataaattagtattctgatatttgtagattattttaatgataaaaatgacactaagctattaatacggcttgtcttaagatatctggaggcatgctctgaaatcctatataaaagagtttaaactgaactttaaggtgcctccatttatcaagggttatgaaactcagaaaattaaattcttgatgctgacctttttgcttgtgggagaattatttctatatattagtgaaatttgaattgtaaacttgtcagtgaatttatcactctgagcgagtctctagagggtgagaatttgagagaaatagtaatttgattatttcattcatgaagcggagtggtagttatccttctattgagagggaagaaataaatgagtattactgaaacttaaagatcagtggaaaaaaaaaacatttaaaaatgttgtaggagactttcaattttggaagcaaactgagctattcttaccagccaaagttatactaaataagagacttgggggagcaaatgtttttcagccttcagaaatgaaagttaaggattttagcactaggtaaaattcagtataataggctgaagtggagtaagtgaaaacctgccttttgccactcttaaaaattgtgcccaaaatataaaagtgtggaactttagaacttggaataattttattgcagtcttccattacatggaaatagcatatctaatatctaggttacttgagagaccagctaatcatctctgttgcacatgtttaattggcaaaaagcaattcatgataaataaaattactgctttccatctactgggtaaaatgactattgaaatagtatgaatgtggtcagaggattatagttgagagtgaagtactatgtgtgagttatagatctctcgaattatatttatagatgcagtgtcctgcccagttttgtttgcctcctacattttactgtaaaatatttattgtcttctagccttgagcctctgagggtcagtaagtgaagtacagatagcaaaattttactacctcgttaacccttttcttaaaatattctctatctttctatgtctctttctgacatagtaatcccaaaggattgtgttactccccgtgaaagttattacttttcctttaaaaatggttttataataagactgtttaaaacctttccagtattggtacatcttggcttctggcccaaaccccaagcagaaaagaaaatggaataatggagcattgtttttccacattagtattagggcatcagattcttggtgaaacactataattaagtagttataattaaataactgttcttcatacttaggactcttaatacatttctttaagacttgtaagtataattgtaaagcttgttaactgtttatatactaaagaaaaagctttacaagataagactgaaattcagaataccacattaaagttttatctgtacagcgttgacaactctaactaaaaggattacagcccttaaaattttagcttaaggacattttaaaattgcatgagattagcaaaattattaatttaaaaccccaaagtaaattgcaaattttaaaatttatttttgactcttttatcacatgctccaatgtatgtacataagtgtctgtggcttaaataatatgttgttatttgatacatttttgtggtgcaagtaattaatgttattatttgattgttataccatatgtgcccattaaaattctttttaattaaaaatatttcaaatatgcagaaaaataataatataaatgcccttgtacccttcacatactattttgccatatttgcttctgatttttaaataaataaaatgttactctttt

SEQ ID NO: 1316 - DNA, 7414 bp, Homo sapiens
gcgatgacctcatccctggtgtgggatgacgtcaaattcaagatggatggaatcacagcggcagcggcggctgcggcgcgcgcgagccgagtgtgagcggaaaggggcccggcgtctgcctcgagactgaagaccgataaactcaagccatggagggattactgcattacatcaaccctgcacacgccatttctctcctaagtgccctgaatgaggagcgtctcaaaggacagctgtgtgatgtgctgctgattgttggagaccaaaagttccgagctcataaaaacgtcttggctgccagcagcgaatactttcagagtttattcacaaataaggaaaatgagtcacaaactgtatttcagcttgacttctgtgagccagatgcttttgataatgttttaaactacatttattcttcctctctatttgttgagaagagcagccttgctgctgtgcaagaacttggctatagtcttgggatttcctttctgactaacatcgtttctaaaacacctcaagccccctttccaacgtgtcctaatagaaaaaaagtgtttgtagaagatgatgaaaacagttctcaaaagagaagtgtcattgtttgtcaaagtagaaacgaagcgcaaggaaaaactgttagtcaaaatcaacccgatgtaagccatacttcccggccctctcctagcattgcagtcaaggccaataccaataagccacatgtcccaaaaccaatagaaccacttcataatttgtcattaactgaaaagagttggccgaaagatagttctgtggtatatgcaaagtctcttgagcattctggatctttggatgatcctaatagaatcagtttggtgaaaagaaatgcagtgttgccttcaaagcctctgcaagacagagaagctatggatgataaaccaggtgtgagtggtcagcttccaaaaggaaaagctctagagctggctttgaagagaccacggccacctgttttgtctgtttgtagctcatcagagactccctatctattaaaagaaactaacaaaggaaatggtcaaggtgaagatagaaacttgttgtactattcaaagttaggcttagtgatcccatccagtggatctggttctggaaaccaaagcattgacaggagtggcccacttgttaagagtctcctcagacggtcattgtcgatggatagccaggttcctgtctattcaccttccatagatttgaaatcttcccagggatcatcttcggtgtccagtgatgcaccagggaatgtgttgtgtgctttatctcagaagtcatctttaaaagattgtagtgaaaaaacagccctagatgacaggcctcaagtgctacaaccgcatcgcctcaggtcctttagtgcttctcagtcaacagacagggagggagcttcccctgtgactgaggtgcgcataaagactgagcccagcagcccgctgtcggacccctcggacatcatccgcgtcactgtgggagatgcggcaacaacagcagctgcctcatcttcgtcggtcacaagagacctgtctctgaaaacagaagatgaccaaaaagacatgagcagactcccagcaaaaaggaggttccaagcggaccgaagattgccgtttaagaagttaaaggtgaatgagcacgggtctcctgtgtcagaagataattttgaggaaggctcaagccctactctccttgatgcagattttccagattctgatttgaataaagacgaatttggtgagttggaggggacgagaccaaacaaaaaatttaaatgcaaacattgccttaagatctttagatcaacagcaggtcttcaccgtcatgttaacatgtaccataacccagaaaagccctacgcttgtgacatctgtcacaagaggtttcacaccaacttcaaagtgtggacacactgtcagacccaacacggcatagtgaagaacccatcaccagcctctagttcacatgctgttttggatgaaaaattccaaagaaagctgattgacatagtgagagagagagaaattaagaaggccctgatcattaagttaaggcgcggcaagcctggttttcagggacagagtagctcccaagcacagcaagtcatcaagaggaacttgagatctcgagccaaaggagcttacatttgtacttactgcggaaaagcgtaccgctttctctctcaatttaagcagcatataaaaatgcatccaggagaaaaaccccttggagtaaataaagttgctaaaccaaaagagcatgctcctcttgcaagtccagtagaaaacaaggaggtttaccagtgccgcctctgtaatgctaagctctcttctctcctagagcaaggaagccacgagcggctgtgccggaacgcggccgtctgcccttactgcagcctcaggtttttctcgcccgagctgaagcaagaacacgagagcaagtgtgagtataagaagctgacctgcctcgagtgcatgcgcaccttcaagtcctctttcagcatctggcggcaccaggttgaagtccataatcagaacaacatggcacccaccgaaaacttttctttgcccgttttggaccacaatggtgatgtgactggttcttcaaggccccaatcccagcctgagcccaacaaagtaaaccacatcgtcaccacaaaagacgacaacgtgttcagtgattcttcagaacaagttaacttcgactcggaagattcctcttgtcttcccgaagaccttagtctttccaagcaactgaaaatccaagtcaaagaggagcctgtggaggaggctgaagaagaggcacccgaggccagcacagcccccaaagaagcgggtcctagcaaagaagccagcctgtggccctgcgagaagtgtgggaagatgttcacggtgcataagcagctggagcgtcaccaggagcttctgtgctctgtgaaaccatttatttgtcacgtgtgcaacaaagcttttcgcactaattttcgactctggagtcacttccaatcgcacatgtctcaggcttcagaggaatcggcacataaggaatctgaggtgtgccctgttcccacaaactctccctctccaccacctctgccaccgccaccaccactgcccaagatccagcctctggagcctgacagccccacaggcctgtccgaaaacccaactccagccacagaaaaactgtttgtgccccaagaatcagacacccttttttaccatgccccacccctttcagcaatcacatttaaaagacagtttatgtgtaaactttgccacaggacattcaagactgcatttagtctttggagtcacgaacaaacacacaattgaaagaccaacactttttacctatgggaggcagtccccagatttcaacctgaattgtgaaatgtgtcataagaaacaaaatattttttaaacaagaataataaaggttggagattgttacgcttgaaattaagttggaggcaaattgataattacttagtaatgtccttaactttagaaatacagcttttaaaatattgtggttctggaccttacaagaacaagatggtttgatttcattaatgttgaaattggattagtcttgattgtgtgcatggttcctcattccatggtgtcagtataatcatttaattgaggtttttggttttttattgattagtggaatactgtcgaagtattccttcttttaattattttagacacttgagttctagttaaatcttaaccatgttcttaagtccaaaataggaagaagtggagtagtttgcagtattgatttatatcttagactactttagcaataaaagataaatctcaactttaataagttatcctgacacttgataaaaataaatatttggtattttgtggtcatgtaaaacttctttttgtatgaaaattgtgagaaatttaaatcagcaatagtaacacttagatttttataaactaacaaaaacttgctctcagtcaatataataaatgatagttaaactctaaggaagacctgggaaatgaaaacaatttatggaagtcccctacagtcagtttataagggcttcagtagtgatagacattgttataaaaacttgtaccatgttacatgtacactgcaccacagtctaaattcagaccagcatttgaaggactgcacatatttcatttcctctgatttatgctgtcacaaattgaaaatctgagtgtagttaggacaaaaaacaaagctaaccatatggcactaattttgattttaacattagtgtaacaaataaggtcgggacatatatttacatagatcccagacactcaagaattagcacagctgatgtaaaattctaaattaccatttacttccagatagagcagaggagaaacacctcactgcagtttcaacatgctttccaagaacaatatatacgacatatacattttcctgcctctctcttgtgacaatttctgttagaatttgttgggggtctgatggttaaaatcatgggcaaggccattctctacatcattgcttaatatttcaaaaataggtattagagcactatcagtggtccaaaattagttttagctacttattttgctccatgggttttgggcttttcaaagaatactatgtataatttgtaattgaaagcctttcagtaggatatccaaagttcaatgtgtttcaaaagggaaaacttttacttgtgggggtgggagttagatgtattaaaaaaacgaaactacaaaatccttttaagaaagtaataccaatttagactctagtttgtgttacgaggtattctttcaaattttttttaaaagccaactactgtcattaagaaataattttagatttgtgctctagcagaaaataactctgtacccatcaatcttattgccaacattccataccagtggtaggaaagatattctcattttttttattgaaccagacatttttataaaatactgattgactttgtacattatggatattatatatgaaattttgccttgtattctttcacttgaaaaaactccaaaattccacaatattttagtagttaacttcctattctttcttaaatttgatggagaagggaaaataaattgcagttattgattcttgccatctttgttttcttaaagaaatctatgcattttaaggataaaactaaagcatatgggtttacatgaaacatcaggatggattattgtacattgaattcattccgcgtataatgtggtatttcttactctgtccatcttggtagctgtcacttcaaaagaagacagtttccctgagtaatcatcacctacatggccattagagtatctatcggtgataattccatgatacagagtatcttggcattataaattcagtatcccaggacctaaacctttatgctacattttcgaagattttttaaaaataatattgttaatcagtaaaaaaaaaaaatatttttgatctaaacataggttctgcatatctgttagattttaaaaatgactggtgttttgtcttcacatttttgtctaagcaaggaatataagatttcaaataaaattttgaaccaaaaacatttataatgccgttctggtttttctattactttttatactgtactttaaaagcattaggctgaaagagtttattttggtggtcaaaaaaaatatgcttccactcatgtaactattttaaatgttaagaagtaaaataatgaaagatatgttaattactttattcagtaaagttttttaagaatgtttatctcagccagtaggcaaatacttggtgtaaaacaagttggtcttaaattgttgcaactcattagctagtgaagatattcatgtaaatatattttaggattgtaattaattttgaaaatgtagaaagctctttattccatgtaagtatgcaggatgcctgcttttttatgcagttgtggaaagaatgtaaaatgttttaatatattctttgttaatctgagaacttgatactgaatcgtttatgtgggagaaggaaggagtaacataaaacatgtttttatcactcaaagtaagcaatggaggtaacaaatattgtgcattttaacagtaatatttgaagatttgtagaatattcacctttaaaactagttagtatgcatttataattttaccagaatatacaactaacaattcaacagtgatgttctttgcatttgtggggagatgtgtgatgttcttggttttctggtttggaatggaacgtttatagccttgcctgtaaaaatgtgccccagcacttaatgagtgaccgtttgaatccatatgtagtcccattggtgctaatgagagtagctgctgtgaaacaggaataaaatgtgtctgttcacggaggtgcggtgtggatgcacctacaaggccaactctctgatcagggtgagggagagatggaagaattaacagatctaaagttggcctttgttgtctcaaattgggtttgtacacacatgcatgcatgtgtgtatacaactgtaatctggaacttcaggaagtaaaattatttgaagtttcttagtaaaaagtaattaggtataattccaaatagatttctgtataaattgtatctaactggattacaagtcagtttgacaatttacgatgtctcagtgatgtttctgcaataattgtgaaatgcattattgatttaaataatgctgacacgtactctttaaaagtgttctttaacactgactactaaactttaagttttaaaaaataggttttcatttatggctttttgtggttttagcactttaagaagtttaattttttgtaatttttaatatgctctttcagtgtatctcagcgggtactccagcttgtggcattcccatgtgactggggagaagacaaaattggtgtttagattctggaggagaaaaaatgagttacaatgtcaggtgtttttaaaaattccttttagagacagtcttttgggaaccaaagtattttactgtaaatctttaaaataacagaattcagtgctctttcatttgttaatgctgtccagatttttcacacagttatactcagttaatactagttttcagaacattagtccaaggctatttcaagttttccattgaatatatgcttatggttaaaagaaaaacgaatggttttataattctgtgtattttgtcatatgccttagcagagtaagtcatttttccattttacttaggaataagctttttcgaactgaaaattcatggtaaaataggatttctatctaatgttaatccattgcttatttgtattcaattccattgtctacagtttgcttaaatgttgactaagaatgattggagtcaataaatttgtactgtattttgcttcga

SEQ ID NO: 1317 - DNA, 2681 bp, Homo sapiens
cgcaagatggcggcgggaggggcccaggttgctgctctggccgccgagtgaggggcggggggggcccgggggcgcgcggcccgagacccccccggccgccctcctcctttctttgttcctgtggctgggggggtatcccctccctccacaacatggagccatctcctctgtctcccagtggggcagcacttcccctgccgctgtcgctggctccgcccccactacccctgccagcagctgcagtggtacatgtgtccttccctgaggtgaccagtgccctcttggagtccctcaatcagcagcgtctgcagggccagctctgcgatgtatctatcagagtgcagggccgggagttccgggctcatcgggctgtcctggctgcctcctccccttacttccatgatcaggtcctactcaaaggcatgacctccatctcgctgcccagtgtcatggacccaggcgcctttgagactgtcctagcctccgcttacactggccgcctcagcatggctgctgctgacattgtcaacttccttacagtggggtctgtgctccaaatgtggcacattgtggacaagtgcactgaactactccgagaaggccgggcctcagctaccaccaccatcactactgctgcagccacctctgtcactgtccctggtgctggggtgccatccgggagtgggggcactgtggcccctgctaccatgggctctgcgcgctcccatgcctccagccgggccagtgagaatcaatctcccagcagcagcaactacttcagccccagggagtccactgatttctcatcttcctcccaagaggcatttgcagcttctgcagtgggcagtggggagcgtcgaggaggtggccctgtattcccagcccctgtcgttggcagtggaggggccacatctggaaagctgctgctggaggcagatgagctgtgcgatgatggtggggatgggaggggggcagtggttcctggggctgggctccggagacccacctacacaccccctagcatcatgccacagaaacactgggtatacgtgaagcgaggtggtaattgcccagcgccaacacccctggttccccaagacccagatctggaggaggaagaggaggaggaagatctggtgttgacctgtgaggatgatgaagatgaagaactagggggtagctccagggttccagtggggggagggcctgaggctaccctcagcataagtgatgtccgtaccctgagtgagcccccagacaagggggaggagcaggtcaacttctgtgagtcctccaatgactttggcccatatgagggtgggggtcctgtggcaggtcttgatgactcaggggggccaactccctcttcctatgccccctcccaccctcctcgaccgctccttcccttggacatgcagggcaaccagatcctggtcttcccgtcgtcgtcttcatcctcatcctcacaggctcctggccaaccaccagggaaccaagcagaacacggggcagtgaccgtggggggcacgtcggtggggagcctgggtgtgccgggtagcgttggtggggtccctggagggactggcagtggggacgggaataagatctttctgtgccattgtgggaaggccttctcccacaagagcatgcgggaccggcacgtgaacatgcacctcaatctgcggccgtttgactgccccgtgtgcaacaaaaagttcaagatgaagcaccatctgactgagcacatgaagacgcacacaggtctcaagccctacgagtgcggagtctgcgccaagaagttcatgtggcgagacagcttcatgcgccaccgaggacactgtgagcgccggcaccgcctgggcggggtcggggccgtacctgggcctgggactcccacggggccatccttgccgtccaagagagagtctcccggagtgggcgggggcagcggcgacgaagcgagtgcggccacgcccccgtccagcagacgtgtctggtccccacccagagtccacaaggtggagatgggcttcggtggaggtggaggagcaaactgaaggggcaggctactggggtggggtagctttcgggaaagggaataaggagcacgatgcaagggcgctgtggcccccgggtgatctcccaccacacttactgtcttcctttatctctgtggacttgtatatattctggaaggggaaccacagtttcaccatcgcccgcccattctactactcaacccctcccccccaaggtatttccagaactaaacccttcctttccctctgatgggtacactgaagcccctgctccacagagtagattgcacatggagggagggagagggggcgtgttgaacatcctgcagtcacagggtcaggggtcaggtggttgtagtctgtgcctgaagtctgtgtttgtgttgtcgtggagacaaggcctttgagccccacccttgtcctagaacctaccccctctcaaggatgcgctctttatttctaccctgtctctccccgccacccccgacttcccgtggaaattcccaactcggttctcatggaggagtgggtggagacaaggagggagtaagtcgtaggagtacaaggtttttattttttttaacagtgattaaaatatttattggtcatttacttggcttcccgaaaaaaaaaaaaaaaaaa

SEQ ID NO: 1318 - DNA, 5974 bp, Homo sapiens
cgggaagcgtttccgggggctgaaggcacaggctgaatctgttgcggcagctgaggctacaacaggcctgcgccggcggcagagaggatatcttgggcgggggatgtgagcgctgagcccttggcagaagtcaatgtgattttaatttgaagcaaaactgaaatgggttcttcttcctcattctattcatgttgctttttgatggccatggcataaggaactctatcccaggaatacagctttgcattagcaccgaacaagatttgtgatgaaatggagcctggaacaaactcttttcgggtagaatttcctgatttttccagcaccattctacagaaactgaaccagcagcgccagcaaggacaattatgtgacgtctccattgttgtccaaggccacattttccgggcacacaaagccgttcttgctgccagttcaccctacttttgtgaccaggtactcctgaaaaacagcaggagaattgttttgcctgatgtgatgaacccaagagtgtttgagaacattctcctatctagttatacaggacgtctagtaatgcccgctccagaaattgttagttacttgacagcggcaagcttcctccagatgtggcatgtggtagacaaatgcactgaagttttagagggaaaccctacagtcctttgtcagaagctaaatcatggcagtgaccaccagtcaccaagcagcagtagttataatggcctggtagagagctttgagctgggctctgggggtcatactgattttcccaaagcccaagaactgagagatggtgaaaatgaagaggagagcaccaaagacgagctgtcatcccagctcaccgagcacgaatacctgcccagcaactcgtccacagagcatgaccgcctgagcacggaaatggcaagccaggatggggaggagggcgccagcgacagcgccgagttccactacacccggcccatgtacagcaagcccagcatcatggctcacaaacgctggatccacgtgaagcccgagcgcttagaacaggcttgcgagggcatggatgtgcacgcgacctacgacgagcaccaggtcacagagtccatcaacaccgtgcagacagagcacacggtgcagccttcgggagtggaggaggacttccacatcggggagaagaaagtggaagctgagtttgatgaacaggctgatgaaagcaattatgatgagcaggtggatttctatggctcttccatggaagagttttccggagagaggtcagatgggaatctaattgggcacagacaggaggctgccctcgcagcaggttacagtgagaatattgaaatggtaacagggattaaagaagaagcttcccacttaggattctcagccactgacaagctgtatccttgtcagtgtgggaaaagtttcactcacaagagtcagagagatcggcacatgagcatgcacctcggtcttcggccttacggctgtggggtctgcggtaagaaattcaaaatgaagcaccatctcgtgggccacatgaaaattcacacaggcataaagccgtatgagtgtaatatctgtgcaaagaggtttatgtggagggacagtttccaccggcatgtgacttcttgtactaagtcctacgaagctgcaaaggctgagcagaatacaactgaggctaactaaaaataggatctggcccttgagtggcatgcacaaaaataaactatggtaattaatgcaaatctgggcacagatgatgcgtgctacttgctattatgagagaagcttaaaaaaaaaaaggaagatatttctgaaagaccagctctaagtaggccaattaaaaaaatctaattcctcaaatttgtgtgttccagtcctggcctggaatgggtaatggggtgagttaacccaccgcccagctggcaagggaaaccttctgactggttgtgatcgaaacaggtggacagagacacctgcacttggaactggactccacccaccagttccattttgggtggcagcagctttggatcactcattattacaaggtcatgctgaaattttattttgctcttgctatagatacttaggtaatgtggatttgttttggtagctatttcactgaaggaagtgctacttatataaaagctagaaataatgtgattcctaggatgagaaattggttaacagagctctgttgtctggttttagtctttctaaaggatattttaactaaaactatggagatgctaagagagtgactttctaaatatgaaacagataatttacggtacaaggctgacatagtgcccttgtcagtttctgtaagatgccactactgtcacaaggtgtttcagactcttgataaggcagtgttttgtattttagttctaacattgagtttggacaattttatctaattgtaattctctagggtgccagagataggtatttctcattggtttgctttcccaaatcctgtttggttaattgtagcctccatacagtggggtcttctctgtggctggtagacaccaagctgctgtgactgaccacggtaccacgggctgccacagcccctgctctgtcttagattatggtgctttacaaagagagtggtccatgaccacacttagtgagaaggagccacaagttgtggctgagagttccctgtgaacttgagtagttcatagagtgctaaggtgacactccaccaaccagagtgagagggcagataggcaggattctatgagtggttatacttaagggggacaaaactgcccaagaagaatcttgagaatacactctttcaaggtgggggagatactctttagagggtacactgagctaatactaccagttctttatgagcactggaatgtgtttgtaaaaggagtcctaagtttagcaaggtagtctacagaaccatgctcccacattatagataaagctgcttaaacttaaaagtccacaaagctacgccgaccagaaaaaaaaaattaaaaaaacaaacaagaaaagcaactattctgagaccttttctgcccatcagttagatgatttaggttaaaaagaaaggtaatattgcacatgcttttaagctgtgtaacatacctgaggttatcaccagggtaggacagggtgctactaccatgtcatcttttccacaatcgtactgggttatttacttctaaatagaaacttttttttcttaaaataaaaataatttttcttggatttggggtgaaattttatttgaaaagtttggctttgctgtaatgtaatagacattgctggcaatggcctctgattctcaagctcctaacaccagggtgtttacttgttgaacattgtctggaaagaggaaagaaaatacttatttaccagttaactcttgtaagcaagattacaaacagggatttattcacaacactgtatcattctcgatatataaaaagcactttgtatttaaaactttattataaatatatatatatattgtttttttttaaacctagaaactagatattacctcttggttgtttgccacattaatagcttctcttagtattgaaacgttactggttagcagtcttttctctgtgtacctgacacacgtatactgaggggattgtacaatcaagcctattgtctccttttctttcactcatggtagaggccagtgggttttaggtatgatcctagccattatatttgaggagaaattgttctattactcctactaatttcagtactaaggtggtgatgccattttgttctgccaaaaactgatcaccctctcccatggtattagcagagcattttctgcctgtttggaaggtttgatgtcctgtttctcattgaagactatttacatgatcattaggacattgcaggagaagtctgagaggtaaaaatacagatattctgggagagtcgtggtccttcagttctgctgaaatcagcatagtgcccttgtcatgaggaagagtttctgttcagccaagagtggtggcacgcttgggtggtagttttggaagcagtcagttgtgctaggacttatttaatatgttgtgaagagaagagtgtcttcttgaaagccttatgtgtccatcagctactaaatgtagaacttaaataagttgctcacatctgttcttttagtgttttgtggtatttgaggttttggcaaaaattgggatttttttatcaggcagccagagcctgggaggtggtagggtgtctgaaatgctggccatgttcagagaggcaggagaagggggttgctttcatttgaatattaaaagtgaatttttgtaaactctggtttttacctttttttcatccccacgttgagttggaggaatagtctcttctcttcacctcaatatagctttagaaaatctttatccttcctaataagtttggatggttgtgggtaacattgttcaaacaatctttcagggatcacgtcaatggcctacaaccaagctatttgtcccctactttgagtcttaactgtggtttttcttcaatccccatgggaaagggcttcaaggcaccaccagtggtatttaatattcatacttggggccaggcatggtggctcacgcctgtaatcccagcactttgggaggccgagatgggtggatcacctgaggtcaggagtttgtgaccagcctgaccaacatagtgaaaccccatctctactaaaaatacaaaaattagccaggcgtggtggcgcacacctgtaatcccagctactcgggaggcggaggcaggagaatcacttgaacctgggaggcggaggttgcagtgagccgcgattgcaccaccacactccagcctgcgcgacagatcgagactctgtctcaaaaaaaaaaaaaaaattcatacttatgccatgcttttacctttagatacacacgttacagtaatccacgtggtgaagtgcatgtcaccgttaactaaggaaggactgcggtaacttaccctgcagggctgtaggttgcctgcaggcgctccaggcccccagcctgttgattccgatttctaggtctcatcttcctctggtcccttttggccactactttaaaagcttgcccaaagggatcccctccattctagtgggcatttgctgaactaacctgcccctaaggctggcttctaaccaccggggaaagctgcttagcctccagggctccctccttgagaggctcacacacccccaagctgctgtggagtgaatttgagacggagcagaagctgcaaagctgtgctttccctggggaaggggatgtgctgcggcctcctgggtgggcgtggagagggcgccatcacaacgagtccaggtttttgcttttggaaggtctctgataatttaggggtgctggaaaccagcactgtgttatccccaatccctcctgtgccaccagttttgtgatttaggttgctttagtgggtgactaacttttgttcagtgaaaccagggtttgtttggggtttttttctttgctacttacatatttaaaggtacaagtttcttatttcaaatctctactgatagtgccctatggggagatgctggaacacattttgcaaatgtgacttttttttttttttttaatttttgcttgaagcctgtgtcatgttagttgctgctgccttctttccttttgtgaggttcccaatgtttcgtccagaaaagtactttatttatgcaagtcaggtgactcttaggccacaaaaccatttgatgataaacagattatcattaggtgcatatcttattgatattttgtgaaatgttatgcctatgttgcaaaagttgaatagttttgtctttatatattgctgtcttcagtgtacagcatggttttacttaattgaatgttaatgtttaatattttcttcttatagaagagatcatgcccttttgtatgacatgttttaataaatgttatctgtcaactttgtaaaa

SEQ ID NO: 1319 - DNA, 1485 bp, Homo sapiens
aaacgagggggaacttccgttctttgttctgtccccggtgtgtgggtctgtgacagggtccaacagggcctggtccgtgtccggtcccccaaatctgtcgtccctgcccccaggcattggcatcaacaaaagtcagaattcccgggaacttgaacagaggctgctaaattcccagtaattgctcctttggccttctagggactgacttcaaagaaggaaggaaagaatcaggcagtgcttcctcattctcttttaaaacccgcttcccgctgagtctgcacccaggagaccagagagcaccttgcccttccatggaaactcaggctgatctcgtatctcaggaacctcaggccctgcttgacagtgctcttccttcaaaagttcctgccttttccgacaaggacagcctgggggatgagatgttggcggctgcgctcctaaaggccaagtcccaggagctggtaacctttgaggatgtagctgtgtacttcatccggaaggagtggaagcgtttggaacctgctcagagggacctctatagagatgtgatgctggagaattacgggaatgtgttctcactggactggatacacgtctgtttaactacgcaaaaggtaatgctggcatggcttactgggaccctaagtgtggcgaagggactctgctccagtgaactggcgagtgtggaacctcctgacaccttctgaggacctcctgcctgccatgttgctgtggagctcgcactcctcaggcatcccctgatgttgagtgatacaaactctatcaccggaatcgatgctgctgcaatgacaagacttctttctggttttcagattctaaagtttaaaacaacgacaacaacaggagcgcttgaaagttacggtgcttctccctctccagtgtggactcgctgatgtttggaaagattggacttgctacagaaggtctttccacagtgatgacaccagtagggcttttccccggtgtggattctgtggtgtttattgaagttggagctgtggttgaaggctttcccacactccttacacttatatggcttctctccggtgtggagtctctggtgggagctgaggcccgcatgctgactgaagctcttcccacattcgttacactgataaggcttctccccagtgtggatccgatagtgacgaatgaggctgcctttcccgctgaaagccttgccacaatctttgcactgatatggcgcctcttctgtgtgcattctctgatgtttaagaaggtctgagctctgcccaaaagcttttccacacttacagtcatagggccggtccaccaagtgtgttctgtagtggagggtgaggtttgagctgtggctgaaagctttcccacacttggtgcacacgtaaggtttctccccagtgtgtgttctcctgtgtttggtgagatttgagctattactaaaggctttgccacattcagcacaaaaaaaaaaaaaaaaaaaaa

SEQ ID NO: 1320 - DNA, 150 bp, Homo sapiens
tatgaatgtaaggaatgtggaaagacttttagtcgagcctcgtaccttgtacaacatagcagaatccatactggtaagaagccctatgagtgtaaggagtgtggcaaggccttcagttctggctcataccttgttcagcatcaaagaatt

SEQ ID NO: 1321 - DNA, 3282 bp, Homo sapiens
agtacgaagacgaccgggctctcaagatggcggccccatgcggaaacagctccagggagcagccatgttgcttcctgaacaaagcctctgaagatgcggaacgggcaaaaccgcccagtacggaacggcgcagcctcgggagcccggtgtggtgctcgcggacaggaagcaggagagtttgccaatagggatgtgacagcggttcccattaagcggtgatggtggttttgggacctgataatcgagctgggagtcagaggcgggatgtgtgcggtgaaggatgttttgatacccccatataaaataatctgtctgtcatgggagcccccacgtcctctgaaatagttcagctctgtctgcatgacttgtcctgggactgaggaaaatttaccagtcatctggccttttggaagagcaaaaaatgatgaagtcccaggggttagtatcattcaaggatgtggctgtggatttcacccaggaggagtggcagcaacttgacccttctcagaggaccctgtacagggatgtgatgctggagaactacagccacctggtctcaatggggtatccagtttccaaaccagatgtcatctccaagttggaacaaggagaagagccatggatcataaagggagacatatcaaattggatctatccagatgaatatcaggcagatgggagacaagacaggaagagtaaccttcacaactcccagtcatgtattttggggacagtttccttccatcataagatactgaaaggagtcacaagggatggttcattgtgctccattttaaaagtctgtcaaggtgatggtcagctgcagagatttctagagaatcaagacaaactcttcaggcaggtcacatttgttaacagcaaaacagtgactgaggcatcagggcataaatataatccactggggaaaatatttcaagagtgcatagaaacagatatatcaatacagagattccataaatatgatgcttttaaaaagaacttaaaaccaaatattgacctaccgagttgttataagagcaattcaagaaaaaaacctgatcagagttttggaggtggaaaatcatctagccagagtgagcccaattctaatcttgagaagattcacaatggagtaataccttttgatgataatcagtgtggaaacgtttttagaaatacacaatcccttattcaatatcagaatgtggaaactaaagagaaaagctgtgtatgtgttacatgtggaaaagcctttgctaagaagtcacaactcattgtacatcaaagaattcatactggaaagaaaccatatgattgtggtgcatgcggaaaagccttcagtgagaagtttcatcttgttgtacatcagagaactcatactggggagaaaccttatgattgttctgaatgtggaaaagccttctctcagaaatcgtcccttattatacatcagagagttcacactggggaaaaaccctatgaatgtagtgaatgcgggaaagccttctcccagaaatcacccctcattatacatcagagaatacatactggggaaaaaccctatgaatgtagagagtgtgggaaggccttttcccagaagtcacagctgattatacaccacagagctcatactggagagaagccgtatgagtgtaccgaatgtgggaaagccttctgtgagaagtcccacctcattatacataaaagaattcacactggtgagaaaccctacaaatgtgctcaatgtgaggaagccttcagcaggaagacagaactcattacacatcagttagttcatactggggaaaaaccttatgaatgtactgaatgtggaaagacattctcccgcaagtcacagctcatcatacatcagagaacacatactggagaaaaaccctataaatgtagtgaatgtggcaaagccttctgccagaagtcacatctcattggacatcagagaattcacacaggagaaaaaccttatatatgtactgaatgtgggaaagccttctctcagaagtcccaccttccgggacaccagcgaattcatacaggagagaaaccttacatatgtgctgaatgtggaaaggccttttctcagaagtcagaccttgttttacatcagaggattcatactggggaaagaccctatcaatgtgctatatgtgggaaggccttcatccagaagtcacaactaactgtacaccagagaattcacacagtggtaaaatcataatgaactggccacagaaaagccttagtattagctcaagccttaataattactagaaacccaattaatttgataagcttggggacaacatcccaatagataaaaatttttaagggaatttgtttctagtttggtgatgcctaacttttccagcaaagatgatggaaaatagttatataaatgaagaacatttttaatatggcatgtaaagcttttaaagttatgaactcagtgatcagcacagcaagttaagcatacagaatattgtcaagttgcatattccttatactacaaaatgataatcagccattgtgaaactgctaatattagcttgtcataattatggccataaactaatttttctataaaagacgtggaagaaagcttaagtaaacaataaaataaaacctatacactattttaagaaggggcttgagcatgacccctaaagctacatgtaaagttcttgtacaaaaaatggaatgataggttgatcagattcagtaaagttgatctgtatgcattttcccatctcaagcatataagttgacctgcatctctggaaggaccttgagattgatgcattttgagcaggtctcccttttactcttcccaactgggaacttggagctgaaaaacattggcactgaggccagatggccttgggtttaatcctggctcagtgcctcacagattgtgtgactttaggcaaacatacttctcctagctgagtattttttatcagtaagtacaaatacaatgcagagctcattttcagttaatattagtactttttaaatctttactctctatcttgaagcattagatgttaagactaatgtgtaaaaaccacgtctgagcttgcttttccctctggacactctgcttttgattgcctatccctataagtggctcattttactgtcttctgatcctggtggccttatttttgctatgttaaggttgtgttttttaatacttggatttattttcatatacttacataaaccgtggtgattgcacataaagaccctgaaaaaaaaaaaaaa

SEQ ID NO: 1322 - DNA, 2665 bp, Homo sapiens
gtgggcggtgcactgggtcagtcccgcgatagcttcaggcctggcggcggcttccaagctaaggaacggtttggggcagtgtcgttcccggaggtcggccgccgttacccgctcaccagctacgcggcgcgtcaggtccgcggaggcgcgggctcggggcgcctgcgggacggtgaggccctgctgaggactccggacactgcccatctctaagataagaacctggaaaggggactctgttggccattggaaattgcagaataatgtctcaggtgacatttagtgatgtggctatagacttctctcatgaagagtgggcatgcctagattctgctcagagggacttatacaaggatgtgatggtccagaattatgagaacctggtctctgtaggtctttccgtaactaagccatatgtgatcatgttattggaggatggaaaagagccctggatgatggagaaaaaactgtcaaaagattgggaatcaagatgggaaaacaaggaattatcaacaaagaaggatatttatgatgaagattcaccccaaccagtaacaatggaaaaagttgtaaaacaaagttatgaattttcaaattctaataagaatttggaatatacagaatgcgacacatttagaagcacctttcattcaaagtctactctttctgaaccacaaaacaattctgctgaagggaattcacacaaatatgatatattaaagaagaatttatcaaaaaagtcagttataaaaagtgagagaataaatggtggaaagaaacttttaaattctaataaaagtggggcagccttcaaccagagcaaatctcttacccttccccagacttgtaatagagagaaaatctatacatgcagtgaatgtgggaaagcctttggcaaacagtcaatcctcagtcgccactggagaattcatacaggagagaagccctatgaatgtcgtgaatgtgggaagacttttagccatggttcatcccttacacgacatcagataagccatagtggagagaaaccttacaaatgcattgaatgtgggaaggcctttagccatggctcatcacttactaaccatcagagcactcacacgggagagaaaccgtatgaatgtatgaactgtggaaagtcttttagtcgtgtgtcccttctcattcagcatctaagaattcatacgcaagaaaaacgctatgagtgtcgtatatgtggaaaggccttcattcatagttcgtctctcattcaccatcagaaaagccatactggagagaagccttatgaatgtagagaatgtgggaaagctttctgctgtagctcacaccttactcaacatcaaagaattcacagtatgaagaaaaaatatgaatgcaacaaatgtctcaaggtctttagtagcttctcatttcttgttcaacatcagagtattcatactgaagaaaaaccgtttgaagtttagaaatgcaggaaatccttcaaccagcttgaatcactgaatatgcatttgagaaatcacattagattgaaaccctacgaatgcagtatatgtgggaaagcctttagtcataggtcgtccctgcttcaacatcacagtattcatactggagagaaaccttacgaatgtattaaatgtgggaagaccttcagctgtagttcaaaccttactgtacatcagagaattcatactggagaaaagccatataaatgtagtgagtgtgggaaagcttttagcaaaggctcgaatcttactgcccatcaaagagtacataatggagagaaacccaatagtgtggtaagtgtggaaaagcctttagatcatatgaatccctatacatgtgagaaatcttacagaagagaagcagtgtttatcacggtaaacttcattcatagatcctcccttatttaacatcagaaaaatgtatactggggaaaagttgtatgaaggtggtgaacatgggagacttttagcaatgatgcagatttttttattagagtttatactgtagagaaatcatatgaagtcaataaatgtgggaaagcctttgtcagtattaatcccttaattgacctaagtatactcacactaggaaaaatctgtgtacatgtagcaaatgtgggaaagactataggcaataggaatctcctgcaaactcctacaggagaaaagttgtatgaatgtggaaactttagaaattgaaggaatttttcagttccaagtgcatcccttattctataggaaataaactggagacaaatctcatttaagagatgcagcaaagtgttcactaagagtgtttatcttgccagacataagaagatgaatggtagagcaacctgaaggatttagaaattacatataaatctttgcagttatgctatttgtaaacaggattatataggagagcaaataaacataagtatgcatttcttagagcagtagcttgcagtttcagttgagttctacttagaaattctttttagctagtgggcatgtgaagatatttagtcacccagaggagccagtaaatgttataatgttaaaaattaaagctgcaaaagaaataaaatggtgttaataaaaatttggcatctaataaaatcattttgtatatcatgaacaaaaaaaaaaaaaaaaaaaaaaaaaaaaaaaaaaaaaaaaaa

SEQ ID NO: 1323 - DNA, 4417 bp, Homo sapiens
ttcctatgcccggtccgtgcattctggttgtgaaggctgagttctagagatcgggtcggctttctacgcggctctcgtggaacctagcaaagaaagacagtgaagactgcaggaccttccttcgcgcttttgttacaatccatgacccctgtcgtgggacgggcggcctctcgcggaggtgtctgccggggctgggctcttaccgaggcctccacacacgtcctcttgtccttgtctcccccagaagcagccgccttagtcttgtgagcgtttttacaccgggtagattgagacttggagtgctacactcagcccgagggcgtccagcgcggtggaggcgtggggtttcggctgagcccacagggcacagactgttcatccgcttctcatggcagcggcggtgctgatggaccgggttcagagttgtgtgaccttcgaggatgtgttcgtgtacttctctcgggaggagtgggaactccttgaggaggcacagagattcctgtaccgtgatgtgatgctggagaactttgcacttgtggctacactaggtttttggtgtgaagcagaacatgaggcaccttctgagcagagcgtttctgtagaaggagtgtcacaggtcaggactgctgagtcaggtcttttccagaaagcacacccatgtgagatgtgtgacccactcttgaaagacattttgcacctggctgaacaccagggatcacaccttacacagaaactgtgcacacgtgggctgtgtaggagaagattctcgttcagtgcaaacttttaccagcaccagaagcaacataatggagagaattgcttcagaggggatgatggaggggcctcatttgtgaagagctgtacagtccacatgttagggagatcctttacgtgcagggaggaagggatggacttaccagatagctctggccttttccagcaccagaccacttacaatagggtgagtccatgcagaaggactgaatgcatggagtctttcccacacagctccagtctcaggcaacaccaaggagactatgatggacagatgcttttcagttgcggtgatgaagggaaagccttcctggacacctttactcttcttgacagccagatgactcatgctgaggtgagacccttcagatgcctaccatgtggaaatgtgttcaaggagaaatcagctcttattaatcacagaaaaatccacagtggagaaatatctcatgtgtgtaaggagtgtggaaaagccttcattcacttgcaccacctaaaaatgcaccagaaatttcacactggaaaaagacactatacatgcagtgaatgtgggaaggccttcagccgcaaggacacacttgttcagcatcagagagttcacactggagaaagatcttatgactgcagtgaatgtggaaaagcctacagcagaagctcccaccttgttcagcaccagagaattcacacaggagaaaggccttataagtgcaacaaatgtgggaaagcctttagccgtaaagacacacttgttcagcaccagagatttcatactggagaaaggccttatgagtgcagtgaatgtggaaaattctttagccaaagctcccaccttattgagcactggagaattcataccggggcaaggccctatgaatgcatagaatgtggaaaattctttagccataactctagcctcattaaacatcggagagtccacacaggagcaagatcctacgtgtgcagcaaatgtgggaaggcctttggctgcaaagacacacttgttcagcaccagataattcacactggagcaaggccttatgagtgcagtgaatgtgggaaggccttcagccgtaaagacacacttgtgcaacaccaaaaaatccacactggagaaaggccttatgagtgtggtgaatgtggtaaattcttcagccatagctccaaccttattgtacaccagagaattcacactggagcaaagccttatgagtgcaatgaatgtgggaaatgctttagccacaactccagcctcattttgcaccagagagttcacacaggagcaaggccttatgtgtgcagtgaatgtgggaaggcttacattagtagctcccaccttgttcaacacaagaaagttcacactggagcaagaccttatgagtgcagtgaatgtgggaaattctttagccgcaactctggcctcattctgcaccagagggttcacactggagaaaagccttacgtatgcagcgaatgtgggaaagcctatagcagaagctcccatcttgttcgtcaccagaaagctcacactggagaaagagctcacgagtgcaacagttttggtggccctttagctgcatctcttaaacttgtttaacaccagaaaattcacacaagagaaaggccttatgaatgcagaaaatatgtcatcttgttcatcctcataggactcacaccagagcaatgctctgtgagtaccctttgtgagggaaccatcagctagcagatgagcaccgtatattcattccaccctggggagattcctgataagcaccacatatgtgggaggctttcatgaggtgtgttgcactttgtaactgtctagagctcttgatggaattatatcactgccagtgcctgtggcggaagccatcttattgctaccagctgtgtgtgtcaatcactccattttgctcagggaaggcagacttctgtgctttctttcctgttccctacaggtaatcatgaatattttcaaggacttccccccccccccacttcaccccctaccattgagggtcctcatcttttccctcatgattaggttctgagcaaacatgatctagctctcaccaaaaggacctgagctagggtctgctgggatttcctgacacgattttccatcttcatggacaatgttaactgtaaacgtgatagctgtgacttacttgtcttactgccaaatcgcccaaatttggaactgcttgtcccatgctgctctgatttatacagtgataagggcctattgtggcagtctttactcttggggattttgttactgtgtagagtggattgagaaaagaattgggttctgtcatgaagggagtagcaccttttgtgggcaccacctttatgtgcctcagaggggaccaaaggatggcagaaaactgttctcagtctagtttgacctaatttacactattgccctaggcttgctaggaaagactgaaaaaatttttgtgcctaactttgtggcctggctgccaggatttcctgtgagcccagtgaggagggcatagttggtgcgaaaatctcctgtgcttgtggaagcaacataagttgggtcccttaactgtcacgtactccccagcactgttgagggattgctgtcttctgtacctgtacaggatcaagtccctgatatccagaaccccataggcaagtaacattgactgtaagacctctgtagggcaatgtgaaaatcatgattgctacagaagcactgagataatggagtggggatgactgtggcaaacaaaaggagattcgaacattctagaggggcatccacaagtctcggtgcagttatgatggtgtgggatgggagtgcatagaaattctcaggaccttcagacatctgtatctcctgtggccaaggccactgtcagaggaaataatctaaatgtttgtggattcctgtgtctccctgggcagttgacctgcacagacaggaacctcagcagtgacagaagagagatccagggatgggtcttctctgacccagccagcattccgagtgactgaggtggatgtggacatcattgcttaccaatttttaccaacattgaggcagggctcactctcctaaattgtagggagaggaatatggtaaagccaaaatagttgacagatctaactttcctagtggaacagtatatatagattttaatgaggaacatttatttaatagctttatggaggtatgattaacatgcaataaactgcaaatatgtaaagtgtaaaatgtgctgtttcagcatgtgtgtacacctatgaaaccaccacagtcaagatatccaacacaacaaaagattgtccctttataatcctcaatttttccttatcttgttttccacaattcacaagcaacagcaagcattttctataattttataaatgaaaccatatggtgtgtactttttagggggtggggctctggctttttcagtaaacataactattttaaggttaatccattatcttgttgcatgaatcaattgtttgctcatttgtattgctgcgtagtatttcagtatttcattgtataccacaatttttcttctttgtcaacttaattgttatggatgtttgggtaactttcagtttttggctattacaaataaacctctgaagatttgtgtgcaaa

SEQ ID NO: 1324 - DNA, 3931 bp, Homo sapiens
gggtcccaaaagggttcgaggcctcttgccttcgctccgtaggagggagttctcttctggccctgggggccgcaggactgtccaggaatacagtttccaggtgagatcttacttgaaacaccggtagttctagcacagctaaaatggcatctacttgggctatccaggcccacatggaccaggatgaacctttggaagtaaagatagaggaagagaaatataccaccagacaggattgggacctgcgtaaaaacaacacccatagcagagaggtcttccgtcagtacttcagacagttctgctaccaggagacatctggtccccgtgaggctttgagccgactccgagaactttgccatcagtggctgaggccagagacccacaccaaagaacagattctggagctgctggtgctggagcagttcctgaccatcctacctgaggagctccaggcctgggtgcaggagcagcatccagagagtggggaggaggtggtgactgtgctggaggatttagagagagaactggatgaaccaggagagcaggtctcagtccacactggggaacaggaaatgttcttgcaggagacggtacgtctacgaaaagaaggagaacccagtatgtccctccagtccatgaaagcccagccaaagtatgaatctccagaacttgaatcccaacaggagcaagttttagatgttgagactggaaatgagtatgggaatttaaagcaagaagtttctgaagaaatggaaccacatgggaagacatccagtaaatttgaaaatgatatgtccaagtctgctaggtgtggagaaactcgtgaacctgaagaaataacagaagagccctctgcttgctccagagaagataaacaacctacctgtgatgaaaatggagtaagcctgactgagaactctgaccatactgaacatcagagaatctgtccaggagaagaatcttacggatgtgatgactgtggaaaagcttttagtcagcactcacacctcatagaacatcagaggatccatactggagatagaccctacaaatgcgaagaatgtggaaaagctttccgtgggagaactgtgcttattcgacacaaaataatacacactggagagaaaccgtataagtgtaatgaatgtggcaaagcctttggccggtggtcagctcttaaccaacatcagagacttcacacaggagaaaaacactatcactgtaatgactgtggcaaagcctttagtcagaaagcaggcctctttcaccatatcaagatccacacaagagacaaaccttatcagtgcactcagtgtaataaaagttttagtcggcgttccatacttactcagcatcaaggagttcataccggcgccaagccgtatgagtgcaacgagtgtggaaaagcctttgtttataactcatcccttgtttcccatcaggaaatccaccacaaagaaaaatgctatcagtgtaaggaatgtgggaaatccttcagtcagagtggccttattcagcatcagagaattcacactggggaaaaaccctacaaatgtgacgtatgtgaaaaagcctttattcaaaggacaagtcttacagaacatcagcgaattcacactggagaaagaccctataaatgtgataagtgtgggaaggcgtttactcaaagatcagtcctcacggaacatcagagaatccacactggagagaggccctacaagtgtgatgagtgtgggaatgccttccgaggaatcaccagcctcattcagcatcagagaatccacactggggagaagccctaccaatgtgatgagtgtggaaaagccttcagacagaggaagaagaccagctacaaggaaatacttctgaaaaatcactctgaaccccaagctggagtgaatcttctcctgagctctctcattccagaatggcaatcttgtttcaggagagatctctaatagtgactgatggtaaaggaagaaggctgtgcctagaacaaagaatcaggctggcaaagaaatcacaggtctttcctcaaactttaaattgctactctctggagatagctacctggactttacagagctgtcagaagacttgggaaggtttgccagcattggaaaaagccacttggacttcacagagctgtcagaagacttaggaagctttgccagtagttcctgagaccagaaatacatattatgaagcaggtgctggaacaggccctggcccctacttgtgaagctgcagatatagatggtgttactgagaaggaaactaaggacttggctccaaaacaaaacaaaacaaaatctggagatgctgaattttgttggggggaatgtctgtagaactgcaacatcaatgcagtaagtgtagtaaaagctttagtttatggtgagtcattactcagcatcatggagtccacgatgaagagaatctcttttcaatctgtgcaatcaacaagtttttgaaaggcttttgtttatagtggaaccctcttttccccctagaagaaccaccacaaggaaaaatgctgtcaccataaggaatgtgggaaagttttcagccacatggccttatttgacttcaaagaatccacatgagagagagactgcataaatgtaataactgaggaggcctttgttcagcaaagaaaccttatacaaactcgtataaagaatgtaggaagaccttcacccagaagccaggactgactgtgcaccagagaatctgcacaataaacctgatgaatgtggagatgcttgcttcagcattggagaattcacagtaaagggaaaccctgccagtgtgatgagtacggaaaagtcttcagaggttggaacttgggaaaaatcagtgagtgaattcatattagagaggctcttataaatgagaggattgtggaaacttgtatagacagagatcagacctcaacaagggagcctccacagtattgaaaagttaatataattaatgtaagtgggcaagttgtatggggaatgggtagtctaaattgctcattttagccagtaaaaacattaaattagtttcttagatcaagaaaaggaaatgttagaagttatttttcccttccagaggggtctatatgtgtaagcaaccaggacttttgaaataagttgcatctctggatttgtgatctgtctcctggatgattatctctgttttgggagacaggtattttttcttcatgcctgctctagtctcatctcatatctttaattcattcagcaagtatacacaatagtattatcgtctactgtttgttgtaaatatatatatattattttctttttggtctgagtaggcttgtattggtaccctaggacataaaaatcacatatatcatgtttcagtaaatgcagtgaaaggaactatattattaaattgctgggaatttctgtaaatttgagactacctttatattctccaacacaagaccgtgtaggtgtcccttcagagagtatatttttctagcttggcttctttattttctttatttttttgagatggagtcttgctcctgtcgcccaggctggagtgcaatggcacgatctcggctcactgcaacctccgcctcccaggttcaagtgattctcctgtctcagtctcccgagtagctgggattacaggcacttgccaccattcccagctaatttttgtatttttagtagagacggggtttcaccatgttggccaggctggtctcgaactcctgaccttgtgatctgcccaccttggcctcccaaagttcagggattacaggcatgagccaccatgcccggctgttttttttaagatagaaaaatatacttcatgtatagcctattgacagataatgactgatattttttcttatagataacacataataaacattgtgaagactaaaaaaaaaaaaaaaaaaaaa

SEQ ID NO: 1325 - DNA, 2312 bp, Homo sapiens
agtggcttctgtgccccgccctgcgggtggtttgctagtttcaagcactttgtgagtatggggtgaatcggcgtcggccttccactgtggggttaaatctcatcccgcggctctcctcctgtcggtcctgcagttcttttgtccccgggtagagggatcttctgcagaaatagcgctggaagctagagtgaggcctgagtactgccttggcctaggatggctagagaattaagtgaaagcacagccctggatgcccagtctacagaagaccagatggagcttctggtcataaaggtggaggaagaagaagccggttttcccagtagcccagatctgggttctgagggctcccgcgagcgcttccgaggcttccgctacccggaggctgcaggcccccgcgaggcgctgagtcggctccgagagctctgccgacagtggctgcagcctgagatgcacagcaaggagcagatcctggagctgctggtgctggagcagttcctgaccatcctgccggggaatctgcagagctgggtgcgggagcagcatccagagagcggggaggaggtggtggtgctattggagtatttggagaggcagctggatgagccggcgccgcaggtttcaggtgttgaccaggggcaagaactgctctgttgcaagatggcactattgacaccagccccagggtcacaaagtagccaatttcagctaatgaaggctctgctcaagcatgaatctgtgggatcccagcctttacaagatagagttctccaggtccccgtgcttgcccatggaggatgctgcagagaagataaagtggtagcttctaggcttactccagagtcccaggggttgttgaaagtggaagatgtggccctgaccctcacccctgaatggacacagcaggattcatctcaggggaatctctgtagagatgaaaagcaggagaaccatggcagcctggtctccctgggtgatgaaaaacagactaagagcagggacttgcctccagctgaggagcttccagaaaaggagcatgggaagatatcgtgccacctgagagaagacattgcccagattcctacatgtgcagaagctggtgaacaggagggcaggctacaaagaaagcagaaaaatgccacaggagggaggcggcacatctgccatgaatgtggaaagagttttgctcaaagctcaggcctgagtaaacacaggagaatccacactggtgagaaaccctacgaatgtgaagagtgtggcaaagccttcattgggagctctgcccttgtcattcatcagagagtccacactggtgagaagccatatgagtgtgaagaatgtggtaaggccttcagtcatagctcagaccttatcaagcatcagagaacccacactggggagaagccctatgagtgtgatgactgtgggaagaccttcagccagagctgcagcctccttgaacatcacagaatccacactggggagaagccgtatcagtgcagtatgtgtggcaaagcctttaggcgaagttcacatctcctgagacatcagaggatccatactggggataaaaatgttcaggaacctgagcagggagaggcctggaaaagtaggatggaaagccagttggaaaatgttgaaactcccatgtcttataaatgtaatgagtgtgaaagaagtttcactcagaatacaggcctcattgaacatcaaaaaatccacactggtgagaaaccctatcagtgtaatgcgtgtggaaaaggcttcacccgaatttcataccttgttcaacatcagagaagccatgtagggaaaaacatcctatcacagtgacccatgccatacatgccagagttggtgctcatttgtcactgatctgaagccactccccctggagtctcaactatagaaattgtgggctgggctttatttaccactacacattatcaggtgttagaaaatgtagactgggttagacaaattatcttctaagttctagaaggggtttgtaatcaaaacatatttgataggaggctacgggagagttgtctagaagaggtaagacctgaaactgtttgttctctcccactagaattaaatggatgtttagactggctacttgccctaaaccagcacttggtgatgtctactgggtggatggttgtgatttgggggctgcttctctgaccattctttttgactgtaatgaatcctccacagttggtcagattcataaagtcttatatccccctctgtgccttttctgcaggtgctaataaatgtttattgaatgtaaaaaaaaaaaaaaaaaa

SEQ ID NO: 1326 - DNA, 4243 bp, Homo sapiens
agcattccccgcacgagcccgggagcacttccgccctgttgtgaagtgggtgtctcgagccttggggagcagtcccttttctaggagcctcttgaaggactcaccgtagatgcaggaagacattggatgaggtcagcatagctgaagtgaggtgtctgggttagacaatggctatggccctggaattgcaagcccaggcatctccgcagccagagcctgaagaactcctgattgtgaaactggaagaggactcttggggatcagaatccaaactctgggagaaggaccgtggctctgtctctggcccagaggcctcccgccagcgcttcaggcaattccaatacagggatgcagctggaccccacgaggccttcagccagctctgggctctctgctgtcgttggctgaggccggagatccgtctcaaagagcagatcctggagctgctcgtgctggagcagttcctgactatcttgcctagggaggtccagacctgggtgcaggcacgccaccctgagagtggtgaggaggctgtggccttggtggaggattggcaccgagagaccaggactgcaggacagtcgggactggaattgcatacagaagagaccaggcccttaaagacaggggaagaagctcagagcttccagctgcagccagtggatccctggcctgagggacagtcccagaagaagggggtgaagaatacatgccctgaccttcccaatcacctaaatgccgaggtggcaccacagcctttgaaagagagtgctgtcctcactccccgagtccctactctcccaaagatggggagcgttggagattgggaggtgacagctgagtcccaggaagccctgggccctggcaaacatgctgagaaggagctctgtaaagaccccccaggagacgactgtgggaacagcgtgtgcctgggagttccagtttcaaaaccaagtaatacctccgagaaagagcaaggaccagagttttggggtctaagtcttataaattctgggaaaaggagcactgcagattacagcctggataatgagccagctcaggcattgacctggagggattcaagagcctgggaggaacaataccagtgggatgtggaggacatgaaggtgtcaggtgttcactggggctatgaggagaccaagactttcctggcaattttgagtgaatctcctttctctgaaaagctccggacttgtcaccagaaccgccaggtatatcgggccattgcagagcagctaagggcaaggggcttcctgcggacactggagcaatgtcgctatagggtcaaaaacctcctacggaattaccggaaagccaagagcagccacccaccaggtacctgccccttctatgaggagctggaggccctggtcagggctcggacagccatcagagccacagatggcccaggagaggccgtggcacttcccaggctcggggatagtgacgcagagatggatgagcaggaggaagggggctgggatcctgaagaaatggcagaagactgtaacggtgctggcctggtcaatgttgagtctacccaggggcccaggattgcaggggccccagctctgttccagagtcgtattgcaggtgtgcactggggctatgaggagaccaaggccttcctggcaattctcagtgagtccccattctcggaaaagcttcgtacctgtcaccagaacagccaggtgtaccgggccattgcagagcggctgtgtgctctgggcttcctgcggacactggagcagtgtcgctacagattcaaaaacctccttcgaagctaccggaaagccaagagcagccacccaccagggacatgccctttctatgaggaactggactcgctgatgagggctcgggctgcagtcagggccatggggactgtccgagaggctgcaggtctccctaggtgtgggcagagtagtgctgagactgatgcccaggaggcctggggtgaagtggccaatgaagatgctgtcaaaccttcaaccttgtgtcctaaagccccagacatgggttttgaaatgaggcatgaggatgaagaccagatttcagagcaggacatttttgagggtttgcctggagccttatcaaaatgtcctacagaagctgtttgccaacctcttgactggggagaagacagtgaaaatgaaaatgaagatgaagggcagtggggaaatccctcacaggaacagtggcaagaaagttcttctgaagaggacttagaaaaacttattgaccatcaaggcctgtaccttgcagagaaaccctacaagtgtgacacatgcatgaagagcttcagtcggagctcccacttcattgcccatcagcgaatccacacaggtgagaagccctacaaatgccttgaatgtggaaaaaactttagtgaccgctctaacctcaatacccatcagagaatccacactggagagaagccctataaatgccttgaatgtgggaaaagctttagtgaccattctaatctcatcactcaccagagaattcacacgggggaaaagccctataaatgtggagaatgttggaaaagcttcaaccagagctcaaaccttctgaaacatcagagaatccacttgggaggaaatcctgaccagtgtagtgagcctgggggaaactttgcccaaagcccatcttttagtgctcactggaggaattctacagaagagacagctcctgaacaacctcaaagtatcagtaaggacttgaattctcctggaccacacagcacaaactcaggggagaaactttatgagtgttctgaatgtggaagaagcttctctaagagctctgccctcattagtcaccaaagaatccatacgggagagaaaccatatgaatgtgccgaatgtgggaaaagcttcagtaagagctccaccctggccaaccaccagcgcacccacactggagagaagccgtataaatgtgtggactgtgggaagtgcttcagtgagcgctccaagctcatcacacaccagagagtgcacacaggagagaagccctacaaatgccttgagtgtggaaaattcttccgtgaccgttctaacctcattactcaccagaggattcatacgggagagaagccgtataagtgcagagagtgtgggaaatgctttaaccagagctccagtcttattattcaccagagaatccacacaggggagaaaccctacaagtgcacagagtgtggcaaagacttcaacaacagttcccacttcagtgctcaccggagaacccatgcaggagggaaggcgtcgtaggggacagtttcctcaacaacaaaggaggactcaatgtatatatcttatatcataagatgtatgctagagataaactttccaatttttaagcttggtgtgtacccagggaagttatcttggtataaaccaggtaatttggaagtgaattacaaatactaaggatccagatttgaaggcacttttaagtgtaatttgtttttcttctgtaaagacccacacagaatcctgactgtccttgtatttgctatcatgtaagagctgtgtcagtatttgagccaaactggcaacttacgagattagagttaaatcagtggtcctgagcagtgattccaaactctcactgtgccttcacaccatccatgtgtaatccaccccatcagcagtggttctcctactttctcagtgggggcatatcctcaagggagaatgttgtgactctggtgagagaggagttggcctagagcaggccactgtgagctcagcacagagtaggaagaacagtgacatcattacaaaatcatcaatagcagcaatagctggtgtttattgagctgttgctctttggcaagctctgtgctaagaactttgtatacatcatctcatttaatcttcacaacggccccaggagataagtactaactttctccccatttcctagaggcttgggaaattaagtaactcgcactggtcacacatctgtaagtgggagaggcaggattcaacagatctgtctgtcttgagtctatcgtgctcttattgctatactgaattcccattcatgttaggtaacttaggggccagaatctccatgcactttgtagaccacatttcctgttatgaaatttccacattttgaattttttaaacaaatatggaaactgagaatccctaaggattaaaggacttgggatatccagaaaaaaaaaaaaaaaaaaaaaaaaaaa

SEQ ID NO: 1327 - DNA, 2478 bp, Homo sapiens
atcggccgccgttgcgcggcgcagagcggcagcaagatggcggcgcaacagcgggactgcgggggtgctgcgcagctggcggggccggcggcggaggctgaccccctaggacgcttcacgtgtcccgtgtgcttagaggtgtacgagaagccggtacaggtgccctgcggacacgtcttttgctctgcatgcctgcaggaatgtctgaagccgaagaagcctgtctgtggggtgtgtcgcagcgctctggcacctggcgtccgagccgtggagctcgagcggcagatcgagagcacagagacttcttgccatggctgccgtaagaatttcttcctgtccaagatccggtcccacgtggctacttgttccaaataccagaattacatcatggaaggtgtgaaggccaccattaaggatgcatctcttcagccaaggaatgttccaaaccgttacacctttccttgtccttactgtcctgagaagaactttgatcaggaaggacttgtggaacactgcaaattattccatagcacggataccaaatctgtggtttgtccgatatgtgcctcgatgccctggggagaccccaactaccgcagcgccaacttcagagagcacatccagcgccggcaccggttttcttatgacacttttgtggattatgatgttgatgaagaggacatgatgaatcaggtgttgcagcgctccatcatcgaccagtgagcagagtccgtgcttgctatctgtctcatgttacagagcttccattacatattaaacgtgaaatctatgactcctgtaccttacctgttcaacagacctgaaaatgagccatggcattgggacagggtcacttctgacaggggaagtgggtccccaggtcagcccttctcttccctttgggctcttgccaaagctgtcttcccctactgttaaccttgtttgtcacacggtcgagttcgtattggttctcggctacttcctggagcttctgccgcctcctgtggaagataatctagcttctccacctcttgtttcacactcattcctcccatccagtgtttgtctctcgggtccttcaagccagccaggaccttttctgggtcatgaatagcacaatgaagcaagtgtctcctttccttgtccccaaggtgtgcagactttggcagccgtgcacctgaccagagctgaagctcccgctgggctgtggggttgccagaagctggggttgccatcccggggtacatgtcaccagtcctcttggggttttgtaccatctgatgctggaagttttgattagtgatattttctactactacatatttagagttcactggttcagtcttaaatgcctgcatggtgcctttttaggataaggtataaccatacatttttggtggaagtgtttctgggttagggaagttaaagtctgtttatccgtaagtggggaggagggtcagctaagagaagtgggagggccagagctttttggttctgatttacaaattaatgaagtagtttcaaacaacgcggtcatgtttacctctccatttgggagcctgcctacattcttgttctagaagcacaaaaaatcctcagatgaattagaagaaagaggtttggggactcagcggatactagttcttttaccttctgcttggtaacttagattaaactgagcattgtttttctgtcacaaatgttttccttatgacactggtttcgacatgtaaaatgtgtttgaaaacctgctttgtagatgcagagagaagctataggaaacccagtaccacccctggtctgttctgacgagacatcgttcataaggcacagcacatcgcaagatgaacagttgttaataaaagctgttgctggaaacttgctttaggaacagctcaagaaccttggagttcatatttcacaaatattaataaatataagtccaagagctgtcagcctaatctgtaggagcagaacctctgattgaccaaaaggcatatgggtttaggttggttttttgatgtcatatgtctctgatggggctgcaagtgctacctcgcgcttgtacactgctgctgtggggctccgcgcctgccggtgaagagctgcagatgccgagaagccagcaaacacagggcccactggaaaaaaatagttttttcattagtatttctcgggaggacccaaaagttaaggtcagcttgttcactgtaatttctggaagaagttcactcagaccttcctgaattcagatcatctcagaagtctggagggaaatctggcgaaaccttcgtttgagggactgatgtgagtgtatgtccacctcactggtggcaccgagaaacttacttccttgtattaagtgcacttcttgtatttctaataagatgactttccagaaagtgagatttgttatgttctggcttttaaaaggtaaaatataaataaatttcataacttaatctaaaaaaaaaaaaa

SEQ ID NO: 1328 - DNA, 4072 bp, Homo sapiens
ccattactctctggagtcgattgccccgagacacatgggccaaggaggggtcagcggcgaattctttcggcctgttggggacccctcgtgtccccacgccagactggacctcccgtatgaacttctcttcgcatcggcggcggcttccgtcacctccgctcccccgatcctattcccagtcgtatgccagcttggagagtcacgtgagagcaagagagtagctttctggttgtcctggtgccctgctcaggcaaactgactgccattctctgaggatggcagctctgtcccccacatttgccacgtccacccaggattccacctgtctccaggactcagaatttcctgtttcttcaaaagaccattcctgtccccagaatttggacctgttcgtgtgcagtggtctggagcctcacacacccagtgttggttcccaggaatcggtgactttccaagatgtcgctgtggactttaccgagaaggagtggcccttgctggattcttctcagagaaaactgtacaaagatgtaatgctggagaactacagcaacctcacttcactggggtatcaggtcggcaaacccagcctcatctcacacttggagcaggaggaggagccgaggacagaggagaggggcgctcaccagggcgcttgtgcagattgggagactccatctaaaaccaagtggtcacttcttatggaagatatttttgggaaggaaacgcccagtggtgtgacgatggaaagagccggtcttggagagaagtccactgaatacgctcacttgttcgaagtctttggcatggaccctcatctcactcagccaatgggaaggcacgctggcaagaggccctatcaccgccgcgactatggggtagcgttcaagggcaggccgcacctcactcagcacatgagcatgtacgacgggagaaaaatgcatgaatgtcatcagtgccaaaaagccttcaccacgagcgcgtccctcacacggcacaggagaatccacaccggggagaagccttacgagtgcagcgactgcgggaaagccttcaacgacccttcagcccttaggagccacgcaagaactcacctcaaagagaagccctttgactgcagtcagtgtggaaatgcattccggaccctctcggccctgaaaatccacatgcgagttcacactggcgagaggccttacaagtgtgatcagtgcgggaaggcttacggccggagctgccacctcatcgcacacaagagaacgcacaccggagagaggccctacgagtgtcacgactgtgggaaagctttccagcacccctcccacctcaaagagcacgtgaggaatcacacgggggagaagccctacgcgtgcacgcagtgcggcaaagccttccgctggaagtccaactttaatttgcacaagaagaaccacatggtggagaagacctacgaatgtaaagaatgcgggaaatcctttggcgatctcgtgtcccggaggaaacacatgaggattcacatcgtcaagaaacccgtggaatgtcggcagtgcgggaagaccttccgaaaccagtccatccttaagactcacatgaactctcacactggagagaaaccatacgggtgcgatctctgcgggaaagctttcagcgcgagttcaaacctcaccgcacacaggaagatacacacgcaagagagacgctacgaatgcgccgcctgcgggaaagtcttcggtgactatttatcccggcggaggcacatgagcgttcaccttgtaaagaaacgagttgagtgtaggcagtgtggcaaggccttcaggaaccagtcaacgctgaagacgcacatgcgaagccacacgggggagaaaccgtacgaatgcgatcactgtgggaaggccttcagcataggctccaacctgaatgtgcacaggcggatccacaccggggagaagccctacgaatgccttgtctgcgggaaagccttcagcgaccactcatccctcaggagccacgtgaaaactcaccggggagagaagctctttgtgtcatccgtgtggaaaaggctccagtgagcgcgcctgctttagagacacaggatgattcagaccggaaacagacctcgtgggtgtaagaggaagcctctgtgagctcgcaccttactgggtgcaaaagaatccacggaacttgggagaagtccagttcctgtaaaaactgggaagacgaggcgttctcatcccataggaggtttgtgagaactcacgccgggggtgaaaatgtacgtctgtagcatggagaagccttcagggtacattcagctcttaacaaacacaggaggacttaatggcagcttggcatttaatgtcaaaatccaagccgtggcatttaatgtcaaaatgacttcagaccacttctagccttctgggcccatgagtaataatgagcacactagggagcatctctgtaaacacagtggctggggaaacccttcctagtctcacttgattcctcatgacggaaatcacactaaagagagaaatcagtgaagtaaggaacgtggaaggtcatgaatgggccgcaaaccacggccagctgcttgtctttgtatggcttgccagctaacaatagtggttccatctttaaggaagaagaatgtttgatggagaaaatttgtggccaatgaagtctgaaatacttcctgtcatctgcccctttccagaaaaacttggccgacccttggtctacagcacgggttctcagtcgggcgacgatttggctgtctaggcgtcatttggcaatgtctagagacatttttggtagttagaatggggggaagatactcctgacttgtaataagaagacatcagagatgctgctaagtcggctccagcacacaggagccccccacaacgaagagttagtgcccccaaacgtcactgttgctgaggttgaaaataatcatgcagtcattcctcaattactgcctgcagcaattcctccatttttatgaatcttgtgagcacttacgctaggagaaatttcttttacaaaacttttaaaatacaattagtgctgataattcctatgtggaaatgattccagccatggtcccctcacttgagcatgtgaatattctcacggagagaagccccagcgagattttccggtgaatacgggattgcacttactctttcatcacggaaacagaccccccgagagaagccccaacgagattttccggtgaatacgggactgcacgtactctctcatcatgaaaacagagccccgttcataaatttttcatctttatttttaaggttatactcctctaaataacccttaagcctcatcaagaaaggtttgtttatagtatttttactatagcttcatccttgataacgtcctaatttccttctggacaacctccttgaccaatggcatattgagatctatgtgacatgaggatatttctcagtaccactttgttactggtacctgatgcacacggattgcgaccagagcatgatgcctccatcaagtggtaatatgtttgcagcctgctgtccagccaagagtgacagatacttctagtgacttccccggtatccactctcatcttcttccaatatcaagagaatccaggttctgtcagattagtaaggtgtgctaatctaaattttaaaaaatctcttacaggttttcttgcagctggtaccatccatgtctcacagccctggccactgacagatcagcagatgtcaccacatgggcttctgagaaagctcttgaatggggatcgttcttaaacatgaattcctccctgtatgttttgttctttgctttacttttcaccttgcaaagagatccagtacctagtattggaagatccaccttaacgaccgtgcatatgaaaaccacagtctaaggaagtgactgcagaaagctcacagcgaccctggcctcccctgtggcctctttgagtgtctgcagcagccctggacttccagacttctatcacatgagaaaaaataaaactgattattggtttaagctgcaaaaaaaaaaaaaaaaaaaaaaaaaaaaa

SEQ ID NO: 1329 - DNA, 4220 bp, Homo sapiens
cacagcggacctacaggcgctcagagaagcccaccttccccctctctgtcccgagaaggcttagagtggtacctgcttgctcaagcaacctgctgcctccacccagagcagccgctcctctcctccctcccttccggaagatgctgaggatgacagcttttagcctgactcttacatttctttggcagagcagttagaggccagactgtcctgtgaaggcttctccttccttcttcctctgctcaggagaaaacttacaaacttttaaatgtaagaggcagatgagctgggaacctggaagtgggttgcatctgactctgaaagttcctccctctcgctggcattacctcatgctgccacaaagtgaacggatcactggggaaggcagagtctccccggcactgctgggaccctcccttgaagagcccccatgtcctgtaggcagagccttgtagtctgtccgcttggttactgactcgggctgtctgaccagcccctcttctgtgccttgtctgaggtccttgtccatctctgtgattgggcagcttctctctctggattgggtcacgtgaagcgggaaactgaagccattactctccaaaccctgtttcatcttcccaagcatgtcggaaagctggcaacagccgccacagacgcagccgcagcagccacagccaccgcagcctcagcaccatgcagagccaccgccagccctggcagagcacacgctgcctccgggcacggcggagaaccccctgggctgtgctgtctatggcatcctcctgcagccagaccccggcctgcagcccccacaacacgcacccctgcaggcagcaggagagccaggccccaaatgtggcgtgtgtggtcacgacctggcgcacctgtccagtccgcatgagcaccagtgtctggcgggccatgaccgctcattccagtgcacacagtgtctcaagatcttccaccaggccactgacctgctggagcaccagtgcgtgcaggctgagcagaagcccttcgtctgtggggtctgcaagatgggcttctcactactcacctcactggcacagcaccacagctcccacagtggcctggtgaagtgttccatctgtgaaaagacctacaagccagctgaggcagcggagccagccaccacagccgccccgtcgcttcccgcagcacccgcgccttccactgtcacccctgctgaacaggccgacaagccctacagctgccccatctgccaaaagcccttcaagcacctgtcggagctctctcggcatgagcggatccacaccggtgagaagccctacaagtgcacgctgtgtgacaaaagcttcagccagtcgtcgcacctggtgcaccacaagcgcacgcacagctccgagcggccctacaagtgcgcagtctgcgagaagaccttcaagcaccgctctcacctggtgcgccacatgtacgcgcactcgggcgagcaccacctgttccgctgcaacgtgtgcgagttgcatttcaaggagtcgtcggagctgctgcagcacccgtgcacgccaagtggggagcggcccttccgctgcggcgagtgccagaaggccttcaagcggccctcggacctgcggcagcatgagcgcacacacagcgccgagcggcccttcaagtgcgacctgtgccccatgggcttcaagcagcagtacgcactgatgcgccaccggcgcacacacaagaccgaggagcccttcaaatgcggcctatgtgagaagggctttgggcagcccagccacctgctctaccaccagcacgtgcacaccctcgagactctcttcaagtgccccgtgtgccagaaaggctttgaccaatctgccgagctgctgcggcacaagtgcctgcccggcgcggccgagcggcccttcaagtgccctgtgtgcaacaaggcctacaagcgcgcgtcggccctgcagaagcaccagctggcccactgtgcggcggcagagaagcccctgcgctgcacgctttgcgaacgccgcttcttctcctcttccgagttcgtgcagcaccgctgcgatccggcccgcgagaagccactcaagtgcccagactgcgagaaacgcttcaagtacgcgtcagacctgcagcggcaccggcgggtacacacaggcgagaaaccctacaagtgccccaactgcgacaaggccttcaagcagcgggagcatctcaacaagcaccagggcgtgcacgcccgcgagcagcagttcaagtgtgtatggtgcggggagcgcttcctagacgtggccttgttgcaggagcacagcgcgcagcacagtgccgccgccgcggcagcggagggcgcctaccaggtagccgcctgcctgccctgactctgcggctgtggcccctgccagcctgacctgagtcggcgccgtgggcccagcaggcctcgcgcagcctagctcctcacagctgccttgcaccaagggccccacccagctcggtgttctgagacctcgggagtgaggacgcaggggtatgaggcagggagagggtgtgccgctcgtactcctggcaccagcgggcagtgcgggcggccagattgctgtggcccatccggattccacaaacctctttcccatgacaagattcactttcttgagagccatcagcaccccccttatttccggggcactggagccaggctggaagtcaagtggcttctccctgccctaaggagggtgtgatgccagcccagccttcccatatctttcaagctagcagccacataggttaggaaagcggaggctcatggtggggctggggccccagaggtgggctaggtgtaaggcatcagttgccgtgtgggggagaaggccagctttaagacgtaggcctggggactgggagggcagagggtgagtcacagccctctccgtctgctctagccaggggcgacgtgtccccaggtttctggcaggggagatgtgcagggtgggtcttggggctgggtctgcctggagaccagtgggcccagggggaagggggaagctgagaagttcgtgtgacaccctcagccaagggacagtgccatccttggggacaggaggaaaagcagcctgtctctgctaagggcaaatcctccggttttggaagcgcccctcccacctttgtagtgcagttcctaggtgtggtggggaatgtgccgtgctctcagcagacagaactgctggtgtgaaaggcagggattgtcagcccacctgaggctgggaggaagcaggaccaggcctaggatctccccagcagatgcaaacaagtgtcctcccctgaattgtgtgaaccaaagcgtcaggggcttggggcacagccccagtcagctcaacccagtcctgcttcagagccaagactaggccagggtggggacccccccagtaccctccctacatcaatgtggctgctggcctggaccccaggggtctggtacagccaagatgttctggacaacatccagctacttcaaaggccagagtgtcctttgggtcctcctagagtccccctaggtctctggctgcccatgaggctcatgaagcagagggtatcccagtcatagggagcagaaagagcaagtgggttaaggaagcctgtgggggacctggtggatggagttgaccaacatcgctgggtggctacggccctccttaggaagcccagaaggacctttattattaaaataatcattttgaaccctgctctatcccctgccctcttccagccccacccctccctggtcttgaaagaagactaatcagtgggcacaccaagggccctgaggggcagggagatgccaccatgcttctctgtcaccgtaagaaggctgaccagccacgcccacctcctctgtctgactgagttccttcctgtggccacagggaggggctggtccttccccttggtgctggctctctgtcacaatgcctcaaaagacatggaacccaggcctacaaccgtcccaactgctaattcttttcctttcattttgctttctgaaagcagtttgttatactattcataacattgtagagtttaatttcatgtcattttggatcttatataaaaatgtgaggatttggatttttaaaaagaatgactccattttaggtagccacttttgatgttaatatatagtgagtccaatgtatgctttagaagtaaagacattgaccgtcacagaccactgc

SEQ ID NO: 1330 - DNA, 1176 bp, Homo sapiens
gtccattccgccggcgccggcgctggcgctgctgcgggctcggcgccggcctttgtctgcgggcacgcgccgctgcggtgctcaggaacagcccatggaagaatcatatgaagaggtggtgactgaggtcgtaagcaggagtggacatgtttggatttccaacagctaccctgctggactgtcatggaagatatgcccagaatgtagcgttcttcaatgtgatgactgaagcccaccacaaatatgaccactctgaggctacaggatcctcaagctgggatatccaaaattctttcagaagagagaagctggaacaaaaatccccagattcgaagacactacaggaagattcacctggagtgagacaaagggtctatgagtgccaggagtgtggaaaatccttccggcaaaaaggtagtctaacgttacatgagagaatccacactggtcaaaagccttttgagtgcacccactgtggaaaaagcttcagggccaaaggcaatcttgttacacatcaacggatacacacgggagagaagccttatcagtgcaaggagtgtgggaaaagcttcagtcaacgaggtagtctcgctgtccacgagagactccacactggacagaaaccctacgagtgtgctatttgtcagagaagcttcaggaatcagagtaaccttgctgttcacaggagagttcacagtggtgagaagccctatagatgtgatcagtgtggaaaagccttcagtcagaaaggaagcttaattgttcacatcagagtccacacaggcctgaagccctatgcctgtacccagtgcaggaagagtttccacaccagggggaattgtattctgcatggcaaaatccacacaggagagacaccctatctgtgcggccagtgtggaaaaagcttcacccagagagggagtctggctgtgcaccagcgaagctgctcacagaggctcaccctttgaccactttcctgaagagaagttctctttatgaattaagagtacaaaatcctctgagatgaagcaacctatccagttctatggaatgaatggagaatctttcagaaagaccatcattgggtagggcaaactgatttttttcctttcccccaaaagagtatgaaaaataaatgtcttgtttattatcattatcaaaaaaaaaaaaaaaaaa

SEQ ID NO: 1331 - DNA, 4800 bp, Homo sapiens
ggcctcttcccagccagcttgaaagggtttgcgtagccggccttgtgggcccttgaagcgctctgttaaagcgctctgtgggcggcctggccccaactcctctagtctaggcgcacgaagggagttgctcctaggtcttgtccgtgccgggttcgcttttctttccttcccgaagcctggcccttagatctactatcgcagagtctgcggccgccaggaagcccagattcgagtgtccggagagtaaccggaagtgctgtccccaggcctaggggcggcgccggcggctgccagggagaggcaagaattgagtgttgtgaatagttctgaactagagaccttttgaaaccaaaaggaagatggtcttgagtctttcttgttacgaatgctatcttctttgagaagtcaaattgtcaggatcaggaatgtatgttttcttccatctggattctagggttggaaataccaagtaaggaattaacatatatgatgctggaaacttgtagaggctcatgattgaaaggcctgaaacagatgtatcttccaagttcttatcaagaaaatgactgtgagggcaacgatgggtcaagaagaccagcggaaaactccctaggagagagccatagaaaatgtacacttcagaagagaaatgtaatcagagaactcaaaaaaggaaaatatataatgtatgccctcggaagggtaaaaagatttttattcatatgcatgagattattcagatagatggtcatatataccagtgccttgaatgcaagcaaaacttctgtgaaaacttagctcttattatgtgtgagagaacccatactggggagaaaccttataaatgtgatatgtgtgagaaaacctttgtccaaagctcagatcttacttcacaccagaggatccacaattacgagaaaccttataaatgtagcaaatgtgagaagagcttttggcatcacttagcgctttcaggacatcagagaacacatgcaggtaaaaaattctatacatgtgacatttgtggcaagaattttggtcagagttctgatctgcttgtccaccagcgaagccatactggcgagaaaccatatctatgtagtgagtgtgacaaatgcttcagtagaagtacaaacctcataaggcatcgaagaactcacacaggtgagaaaccatttaagtgtctcgagtgtgaaaaagcttttagtgggaaatcagatcttattagccaccagagaactcacactggggaaaggccctacaaatgtaataagtgtgagaaaagttaccgacaccgttcagccttcattgtacataaaagagttcatactggggagaagccctataagtgtggtgcctgtgaaaaatgctttggccagaaatcagaccttatcgtgcaccagagagtccacacaggtgagaagccgtataaatgcctggaatgtatgagaagttttactcggagtgccaacctaattaggcaccaggcaactcacactcacacttttaaatgccttgaatatgaaaaaagctttaactgtagctcagatcttattgtacatcagagaattcacatggaagagaaaccacatcagtggtctgcgtgtgagagtggcttcctcctaggaatggactttgttgcccaacagaaaatgagaactcaaacagaggagctacactataaatacactgtatgtgataaaagcttccaccagagttcagcccttcttcaacatcagacagtacacattggtgaaaaaccgtttgtctgtaatgtgagtgaaaaaggtcttgagcttagccctccccatgcgtcagaagcctcacagatgtcttgaccaggcgagaagctgtaataccaatattaaaaattatttatgtatcagagaactcattaagatgaggacaaatctcagactttgctcagagctcagaattcagtggggaccagagagcctgcaattggaaatatgagaaattctttgcccagagagctgccctaacagaacacttcatcctcactccaacgagaaatctacagatgcccagaggttttgaaaacttaccgtctgagctcaaatttgatcactcacaagaggattcatacaagtgggaaaccttagaaatgcactgagtgtgagagagctttctactaatgctcagcccttctcgttgtaagagaattcacaccggagaacaactttttaaatgccttcagtgtcagttgtgctgcagacagtatgaacatctcattggacctcagaaaacccaccctggggagaagccccagcaagtgtgaaaaaagcttctaacaaaactctgacttacccatcagagaagccatactggtgaaaaattgtatatttgtcttaagtatggcaaaagcattcgttggagagccttacttgggtttgcacccaaaaaaaaaaacccaatctgaggaaagactgcaagtgtctgaatgaagagtgcttgtcaatgatcaactcttgtggtacatcagggaactcacataggtgaaaaaacccatacttaccttgagtctgagaaaacctttggtagaagctcctgtcttatcaggccccaaaaaacctgttctgcagtgagagatttaattgtgggtgagaatctatgtacatataatatgtatgagaagactgttctcatagttagttgactcatatggtagagaggactttacatgaaatcagtatgaaaatagttttttagatacccagaagcttgttctgggagaagctagggtgggtcagagtagacctgatgggtaactcaggtaaagatgcttttcttttatctgaactacttaatgattgctttacttttactttttaaaaaattcagaaatccaataaaggaaaggacggtaaccttatgatagaaggtgtggcatgtgttactgttgggggaaaggagtatattgactttgccttggttgatatttttatgcttgtctaggatgggactagagtgttgatagtaacatggcagccttttgctggcagtgaaatgaacttaagaagctagggagtagctatcctagatcaaaactctcctaatagtttttcctttgcaggaccaatcttataaagaaacagcatactcagctttttacttagtgtcagttgaggcatactctcaaaagttttttcccctaaaatatctttcaagttattactggtatttgaaatttcaagtttagaaattcatttctttttaactcaaagtgcaaatttcatataatgattatgatggttttagtgtccatatttttgtggcttcacttatcatctctttcagcagtagctacccacagtcagctcctagtaaaatggctacaggaaaactgaaagaaaagtttaagcctgagtaggcatagagtaaaaaatgcataatgatgcattattaatataagagtaaggctttttttattttgagtatcctaactccaaacctagtgttcttttcactccattatcctgctgtttatagcaaatcaagacccataatgatacgtctttcatttatttcagttctgccaaggaaagagaaaataccttttaatcccagggaaaggattgcaatcaccacattataaggtatatggcgtggaatgcagaattctaaatactagaagggaaaagtagttggcagattcatcagaggcttaaggataagtacttgtttccaatttaaaagtataattaggattgtctttaatgttctctagaaatactataattaatctagagatctatcaatggtcacatctcagtttttttcttccctgagattcaaagacgtgtaataccaatacttcagattcctatagtatttgggactttgtagactagtgaatagatactttgttgctagtccaaatcctctgattttggtttgatttgtcctagcagatccctgaacttcagagagtattgccatttggattcatggagttggcgaactgctacactgctaccttgtgtatggctctaagctttgatcctaatgactggttgatgatcatgataatattagggccagtgaatatagctcatagtgataataaggattctagggtatttttttttcttttagaaaaagatcctggaagtttatttgatctgacatgtttttgtaatatttagaaatagctcttgtatcataaaaagttgcccagtataagacacacaagatgtattttttttctctggtgaaaatcatgcctatcactagtatatgtttgacatttgtagtatacttaaaatagtattgggtgtgaggcatggtggtgatgaaaagtagtccttacggctacttgttagtcattagagagaacatggagaaggggtcaaagttggtatcattaacagggcaatgacttgacccttctttcaactgatcttactggtagttgtctctagtttttaagtaaattaatgatggaccatcccccaaacagagaactatgggggtatgaaacaaggctgaaggcttttaaccatgggagaaaaaggtgttggtattattcatatagcataacctgaggttggagaggaccacttgggagcctgtaaccaaaactagaaggtaacttctgggatggacggaggttcccttgaagcagtgccaacctaaatctacctcaggtaagtagttagattaactttttcaagatttcagaccaaacaagacaacttgtattcagttgatgtattcctatgctttaatgtttttgtttgcccttaattattaaataaacatttgttctgaaaaactcca

SEQ ID NO: 1332 - DNA, 3039 bp, Homo sapiens
gttttgggtctcgatgaccatctaactcctaaatgctgggggccgctccccatagaaatgcctcgccggatttctccgcctcgcacccagtgggactgggatttttggccccggggtttgcaataagggagtcaccaagcagcagccacctctggaattcctagaaaggaaagagttgcctggcttcagccagtgggctcagaacggctgacgcatttccggcctttgcggttgatcggtcattggggtgctgcagccccgccacctgttccgtagcttgccggtgccccgaaggtgtcttctcctaaggaagattaaatcagaaaattttaaatcacagttatccctttacttaaagccagagtaagccttccaaattaaccccaggaatggcttcaacagaggaacagtacgatcttaagattgtgaaagtggaggaagaccctatctgggaccaagaaacccaccttcgagggaacaacttttctggccaagaagcctcccgacaactttttaggcagttttgttaccaagagactcctggtccccgagaagctctgagccggctccgagaactctgtcatcagtggctaaggccagaaatccacaccaaagagcaaatcttggagctgctggtgctggagcaattcctgactatcctgcctgaggagctccaggcctgggtgcgggagcaccatccggagagtggggaggaggctgtggctgtagttgaagatctggaacaagagcttagtgagccagggaaccaggctccagaccatgaacatggacattctgaagtgctcttggaggatgtggaacatctgaaggtcaagcaggaaccaacagacatacagcttcagcctatggtgacacagctcagatatgaatctttttgcctccaccaatttcaagaacaagatggtgaaagtatacctgagaaccaggagttggcatcaaagcaagaaatcttaaaagaaatggaacatttgggggatagcaaactccaaagagatgtatctttggattctaagtacagagaaacttgtaaacgagacagcaaggcagaaaagcagcaggcacattccactggagagagacgccacaggtgcaatgaatgtgggaaaagcttcactaagagttcagtactcattgagcaccagagaatccacactggggagaagccatatgaatgtgaagaatgtgggaaggccttcagccggaggtcaagcctgaatgaacatcggcggagccacactggagagaaaccctatcaatgtaaggagtgtgggaaagccttcagtgccagcaatggcctcactcgacacagaagaatccacacaggggaaaaaccatatgaatgcaaagtgtgtgggaaggctttcctcctcagctcatgccttgttcagcatcagaggatacacactggagagaagcgctatcagtgtcgtgagtgtggcaaagccttcattcagaatgcagggcttttccagcatctccgagtccacactggtgagaaaccctatcagtgcagtcagtgcagtaaactctttagtaagcggacacttcttaagaaacatcagaaaatccacactggagagagaccataagggtgatgagtttgggaaagccttcagtcatcattgcaaccttattaggcattttagaatccatactgttccagcagaactggactaattctgtggaccctcagacccctaaatggggccgtcttggaaagtaagattttcaagtggcttattctgttcttataaaatttattttgtattgcattgaaccacttgtctacaaaccaggtgttggtgtctcctgtgtggatgactgtgattgtagggggttgctgggtggccttcttattccctagcctttggtccatttcttatgatttcctttaaaggcaccaaatcttatctggaaataaattgttatggaggggctgtttttgagcaatactgcatattgaacaattctaaaagaccagtatctatgtatacttttaaaaaaaagatttgctaagatcaaaggatattcagaggtgcatctttttctgtaagagtgacattttaaacaaatgtaaggttttggggaataagaatcgtccacattcccacaggaaatcattgctatggtctcccctaggaatgtgatagatagcttctataattatgcagcattatccatagtatgaaacctgtagttttaatggtttagaaatctatgtctcatttcatatctaactcatgtttttgatacgaatcaatatatatgttgatatcatgagttaatatgagtttgacatgaatcatcaacatagtatatacatatcaacataactatgttgatgattcatatcaaattctcaatgcaggtcattactgtaagttttccatttttgttacaaataataagtaagatgatactttaaaatctctgttcttcacaaggtacctctttaattcatagccttttatgtcagcattattcttcttttgggggttggtcagcaactttgagtgccattgcaagcagcatcatttaagtagttttataaagaaaagaagtctgatatcttgggcagcttgctgcttactggggagaccagcatgcttagacacttattgccagggttaaacatatgctctggcaccaagttcaaatctttcctccccatttgtgagctgtgggactttaggcaagttatctaaatgctgctatgctatagtctccccacctgtaaaacagaggatgataccaataccttcctcatagggtacataagattaaataaatacaaacttgtacttaaaatgtagctctcaataaatatgcattatgatttacatacgaaataatagcatttaacaaatgtaggtagaattttaagtatcatgttaaaattaggatacgaaatgcctctgctgacattcttgttactcttttctccacagtcaaaacctgaatcagaatatttcaaaagagaggaaataaaagttcagcttaaaactgttctgccctaaa

SEQ ID NO: 1333 - DNA, 5074 bp, Homo sapiens
tcctgtgcgtccccaggtcaccgctcgccctagttcccaggctttggcctccggtgggcgagaatcgcggagcctgcggggctgggcgccgaagagccgggccggcacccaagcgggcgcggggctgtgcgggccaggcggaggctcaagcggggatccccgagcacgacccccggagccgacggcgctggggcccaaggggccggccgggcggtgacgacggcggaggcgaaggggcggcgggacccgggcccggcccgtgtgcgtcctcgacggcccggccccggctccgcaggacggtgagccccagggagacggatctgggctccgggagggacgccccgcctggatttgtcccgtaggcccggcccgggcccctctggagcagaacggccttggtgaggtggacaggaagggacctcgcgagcagacgcgcgcccgcgacagcaatcccgccccggcctgtcgggagcggtggggcagaggctgcggagccccaggaggatctgcctccgctttcacagtcctccagatttttccaagagcagcagaaaatgaataaatccctggggccagtgtcattcaaggacgtggctgtggacttcacccaggaggaatggcagcagctggatcctgagcagaagataacttacagggatgtgatgctggagaactacagcaatctagtttctgtggggtatcacattatcaaaccggatgttatcagcaagttggagcaaggagaagagccatggatagtagaaggagaattcctacttcagagctatccagatgaagtctggcaaactgatgacctaatagagagaatccaggaagaggaaaataaaccttcaaggcaaactgtgttcattgagaccctgattgaagagagaggtaatgttcctggtaaaacttttgatgtagaaacgaaccctgttccttcaagaaaaatagcctataaaaatagcctctgtgactcatgtgaaaagtgtttaacgtctgtttcagaatatattagtagtgatggaagctatgcaagaatgaaagctgatgaatgtagtggatgtgggaaatcactcctccatattaagcttgagaaaactcatccaggagatcaagcttatgaatttaatcaaaatggggaaccttatactctaaatgaagaaagtctttatcagaaaattcgtattttggagaaaccttttgaatatattgaatgccagaaagccttccaaaaggacactgtttttgttaatcacatggaagaaaagccctataagtggaatggatctgaaatagcctttctccagatgtcggacctcactgtacatcagacatctcatatggaaatgaagccctatgaatgcagtgaatgtgggaaatccttctgtaaaaagtcaaaatttattatacatcagaggactcacacaggagagaaaccttacgaatgtaatcagtgtgggaaatccttctgccagaagggaacccttactgtgcatcagagaacacacacaggggagaagccctatgaatgtaatgaatgtgggaagaacttttaccagaagttacacctcattcagcatcagagaactcactcaggagagaagccctatgaatgtagttattgtggaaaatccttttgccagaagacacacctcacacaacatcagagaacacattcaggagagagaccttatgtttgtcatgactgtgggaaaaccttctcgcagaagtcagcacttaatgaccatcagaaaattcacacaggtgtgaaactctacaagtgtagtgaatgtgggaaatgcttctgccgcaagtctactctcacgacccacctgaggacccacacaggagagaaaccgtatgaatgtaatgagtgtggaaaattcttctctcggttgtcatatctcactgtacattatagaactcattcaggagagaaaccctatgaatgtaatgaatgtggaaaaaccttctacctgaattcagccctcatgagacatcagagagtgcacacaggagagaaaccttacgaatgtaatgaatgtggaaagttattctcccagttgtcatacctcactatccatcatagaactcattcaggagtaaaaccctatgaatgtagtgaatgtgggaaaaccttctaccagaactcagccctttgtagacatcggagaatacacaaaggagagaagccctatgaatgctatatatgtggaaaattcttctctcagatgtcatacctcactatacatcatagaattcattcaggagagaagccctatgaatgtagtgaatgtgggaaaaccttctgccagaattcagcccttaatcgacatcagagaacacacacaggagagaaagcctacgaatgttatgaatgtgggaagtgcttctctcagatgtcctatctcactatacatcatcgaattcattcaggagagaaaccctttgaatgtaatgagtgtggaaaagccttctctcggatgtcatacctcactgtacattatagaactcattcaggagagaaaccctatgagtgtactgaatgtggaaaaaaattctaccacaaatcagcattcaacagccatcagagaattcataggagaggcaatatgaatgtaatagatgtgggaaggcttctctgaagtcagacctcattttatatcagagaaccctttcagtatagtgaatcagaaactcctgcctgaagtcaaacaccttgtacatcagagagttcacacaggttagtgtggacatccccttgtgtgttggactcataatctgaagactcacagaatggaaaccatgattataacaagaccacatggtataacaatactagactatagacaagtaaaaatttataaatattaagaatgtatatacatgtcaccatggattggaactgttttgcatatcagggaaatcatagccaaggggaaatctatcagtataaggaatgtggaagacataatcctttggaaactgttaatactaaaagatatgtttctgatacaatagcaaacttgaaaaaaaaaaaagaaatagaagattcctgctgtgaataaacatacttcttgtgtaaatagaaactgtaaagtcatcaggatagctagttaagtcggtaaccttaaactcatgtaagcagttcccaaagaacataggacttatgtttggggagagggttgtttttattacagtacattacaggaattgtatgttcacttcgaatcatgtttgaaaaaacgttgtatccttattttgtaattcatatagtaagagtattctaaacagcactacattaatatcatttgataggtataaagtatactttttcttgcactcttctctaggatttaatgcattgatcattcttaatgaacaatatcagctctaaaggaccaatgcttttataatgttttcaactgtatctgagtcagccagagagataaatatccatgtataaaatagatagaaaactttgcttggtaatttaaaattaataatgccagttttccaagagtgagaaaatcattgcactctatacagttttaagatatacttaaaatattcccatttgtatctatttttttttctactgttttttatttggacacttacataacagtgcagagcacaatgctgtgtaacataggaattcactgtgttttcatttgatgtcgtactggttttaaaccttgtgctctactccttcctgttaatgaattaagaacacattctaacaagggtctgtggcagacattgccgagtgactttctaacataggaattcactgtgttttcatttgatgtcgtactggttttaaaccttgtgctctactccttcctgttaatgaattaagaacacattctaacaagggtctgtggcagacattgccgagtgactttcttagtcactcccttactctgctggcggagtttggttatccatttatcctcaaaaggaagtgagataaatcctgattagttttaaccagtgacactccccttctcgttgccagcagttgatttacagtggtcacagggcccaattctagacataaaacaaaggatatacctgacagactacttctggaaaaggttttctcaaaggcccaaggattcaagcaaagggaagtggaatcttgtggtgaacagtaccttgtctggatgtggtgcctggtaaccatctttcagcaatggattatagtttaatcatggcctgagcagaaatactgaaagaccctgagacctggatgatgtctttgagccaccaaaccaagcagccttgtagccactcctcctttggactgtttcttttgtgagagactaaacttatttttaagccagttgatttaggatgctctattactaataactgaagacattctaattggtacagactgaaacctttataggagttatgcagttcagaagtggactttaggtaagtcatttattttaagctgttgatatagagatttattttctgtaaattttgacgtaaatagtttgagcattagaaatcaacttgaaacaataaaatgtatgcttccttgaactgtcatatcgttgacctgcaaaattcacctttggaacgtgacacaatgttaggcatacctccttttttctaatacatggaatacattttgttggaggtaatttatgtgattcatataccactgctacagtgttagctgacaacatatagtatgaggtaaggatctaattctgtttcctctcacatgattacttgatagctaagcatctgattggtttactgctttaccactgagctgaaatgccgtgttttccatttattaaaatcacacatggctcctgtttttgtcactcagcactttttctccatattcttcaagacgattgtgagtatggtacgtaacaggaattacatctggtaagttgtatagttttgtgtaggaactctatattcatagcatatttgtggaaatgatacctatggaggtttctcacactggtgtgtcattatacattaattgtacaatatgcattttcagtaaaatatttgaaaactgtaaaaaaaaaaaaaa

SEQ ID NO: 1334 - DNA, 3767 bp, Homo sapiens
gcgcgcggcggcggccgacggcggctgagctgtgctgcgcggcgcggcgcggtgcggcacggcacggtgggagtgtctccggctggcttgcagggagaacaccgactgagacctcaaaccctggctccagtgtcatggaatccgtcacctttgaggatgtggccgtggagttcatccaggagtgggcattgctggacagcgcacggaggagcctgtgcaaatacaggatgcttgaccagtgcaggaccctggcctccaggggaactccaccatgcaaacccagttgtgtctcccagctggggcaaagagcagagccaaaggcaacagaacgagggattctccgtgccacaggtgttgcctgggaatctcaacttaaacccgaagagttgccttctatgcaggatcttttggaagaagcatcctccagggacatgcaaatggggccggggctgttcctgaggatgcagctggtgccctccatagaagagagggagacaccattgactcgagaggaccggccagctctccaggagccgccttggtctctgggatgcacgggactgaaggccgctatgcagattcagagggtggtgataccagtgcctactctgggccaccgcaacccatgggtggccagggattctgctgtgcctgcacgtgaccctgcctggcttcaggaggacaaagtggaggaagaagctatggctcctgggctgccaaccgcctgttcacaggaaccagtcacctttgcagatgtggctgtggtgttcaccccagaagaatgggtgtttctggactctactcagaggagcctgtatagagatgtgatgctggagaactacaggaacctggcctctgtggctgatcaactgtgcaaacccaatgcgttgtcttatttggaagaaagaggagagcagtggaccactgacaggggcgtcctctcagacacctgtgcagaacctcagtgtcaaccccaagaggcaattcctagccaagatacttttacagagatcctgtccattgatgtgaaaggggagcaacctcagcctggagaaaaactctataaatataatgaacttgagaaaccttttaacagcattgaaccacttttccagtaccagagaattcatgctggagaggcatcctgtgaatgtcaagagattagaaattccttcttccagagtgcccacctaattgtgcccgagaaaatccgtagtggggataaatcctatgcatgtaacaaatgtgaaaaatccttcagatacagctctgaccttatcaggcatgagaagactcatactgcagagaagtgctttgactgtcaagaatgtgggcaagccttcaaatattcctcgaatctccggcgacacatgagaacccataccggagagaagccatttgaatgtagtcagtgtgggaaaaccttcacgaggaactttaacctgattttgcaccagagaaaccacacaggagagaagccctacgagtgtaaagattgtgggaaagccttcaatcagccatcatccctcaggagccacgtgagaactcacactggagagaagccctttgaatgcagccagtgtgggaaagccttcagggaacactcttcactgaagacacatctgcgaacccataccagagagaaaccatatgaatgcaaccagtgtggcaagcccttccggacgagcactcatctgaacgtgcacaagaggatacacacaggggagaaactgtatgagtgcgcgacttgcggtcaggtcttgagtcgtctttcaaccctgaagagtcacatgcgaactcacactggagagaagccctatgtgtgccaggaatgtgggcgagccttcagtgagccctcatccctcaggaaacatgcaaggactcacagtggcaagaagccctatgcatgccaggaatgcgggcgagcctttggtcagtcttcacatcttattgtacatgtgagaacacacagtgccgggagaccctatcaatgtaatcagtgtgagaaagccttcaggcacagctcctcactcactgtacacaaaagaacccatgtgggaagagagaccattaggaatggcagcctgcctttatccatgtctcatccatactgtgggccccttgctaattaacttccattttgtaaaaatataaacacatggggctatgactttccctcgtaatactcctttagctgcatcctgtgtttcaatgtataatattttcattttggtttaattgtaagtattgtcttaacctccattatcgtttattctttgacccatctattatttggaattagatttttcaaaactaatatgtggatatattttcatagaggtataatgacttatagtgaaatgcatacatctgaagtgtacagttggatgagtttgacagatgcatacatgcatgtaaccaccaccccattccagatatagaatgtttctatctctctggaaggttcctgcatgttatatggctatttcttagttgcctttttgttgttggtttctaatttaattacatggtgagaagagtatgtggcctctttgttactgagtcataggtatttgctgagatttgctattaggtctggtgtggcttattcttctagctgccaacccaaattaccccttcctccttagaaaagaacctgggttttctgttcagattggcagtgtgcactattaaaaagcttccatctcccggctgggcacggtggctcatgcctctaatcccagcactttgggaggctgaggctgggggatcacctgaggtcaggagttcgagatcagcctggccaacatggtgaaatcccctctctactaaaaatataaaaattagccaagtttggtggcatgcacctgtaatcccagctacttgggaggctgaggcaggagaattctttgaacccaggaggcagaggttgcagtgagccgagattgcgccactgcactccagcctgggcaacagagtgaaactctgtctcaaaaataataataataaaaaaaagcttccatctcccagcccttcttgcaagcaagggcaggccatttcctccggtcctggctagtatgaatatgagaagtcactggatgtgactctggggaagatattgtgttcagggatggtttcatgtagccacatctctccacttcttgccttttggacaagtagacatgatttctagacctagaggagccctcctgtgaccataagggtaaaagccgcaagctaagaagagggtggccggaagtcataaccatcttgcttctgtaatctaaaaaatatttaggatagatttaatagaattggcatatttatgtgattgcagcagccctggactatttatttctggatgtcccatacatgaaaaatatgcacttcttactggtacagttttcttttgtttgtttttgtttttggtgggaggtttatttcacctgaatataattcctaactgatgcacttagtatatgtcagtttttataaatgcttcatggatggttgaaatcaatgtattgtattctacaaatgtctgctagatcaagcaaatgtgtttaaaaaccatctacacatttataaatgttgatctgtgatctagcatttattgagagaggtatgttaaactctcccaccatgattatgtattgctgaaaaatctttgtcattctgtcagtttttaaatttatgtatatacatacatatatatgttttgaagcaatgaaattaaatatagatactgacattttttacatttccaa

SEQ ID NO: 1335 - DNA, 2467 bp, Homo sapiens
tcttccgggtgagggtcctgcagcccgtgaatccctggtcccgccgagacttggacctggtgcgaactggaggcgaagcgggtgcacccacaacctataggaagggctggcggcgagctctgagcactcgggcgtcggagggaacgctctgctttcaacactcttggccctttctcaagagaacatgaaaatgaaaaaatttcagataccagtttcattccaggacctgactgtgaacttcacccaagaggaatggcagcaactggaccctgctcagaggctcctgtacagggatgtgatgctggagaactacagcaacttggtctctgtggggtatcatgttagcaaaccagatgtgattttcaaattggagcaaggagaagagccatggatagtggaggaattctcaaatcagaactacccagacattgatgatgccttagagaagaacaaggaaatccaagataaacatttgacacaaactgtattcttcagcaacaaaacactgattacagaaagagagaatgtatttgggaaaacacttaatctgggcatgaatagtgttccctcaagaaaaatgccctataaatgtaatccaggaggaaacagtttgaaaactaattcagaagtaattgttgcaaagaaaagcaaagaaaacagaaagattcctgatggatacagtggatttgggaagcatgagaaaagtcatttgggaatgaaaaaatacagatacaatccaatgaggaaagccagcaatcaaaacgaaaatcttattctgcaccagaacattcagattttgaaacaaccgtttgactataataaatgtgggaaaaccttcttcaagagggcaattctcattacacaaaaggggagacagactgaaaggaaaccaaatgaatgtaatgaatgtaggaaaaccttttctaagagatctaccctcattgtacatcagagaattcatacaggggagaaaccgtatgtttgtagtgattgtaggaaaacttttcgtgtgaagacaagcctcactcgacaccgaagaattcatactggagagagaccctatgaatgcagtgaatgcaggaaaaccttcattgacaaatctgcccttattgtacaccagaaaattcatggaggggagaaatcctatgagtgtaatgaatgtggaaagaccttttttcggaagtcagccctggctgaacatttcaggtcacacacaggggagaagccttacgaatgcaaggaatgtggaaatgccttcagcaagaaatcgtatcttgttgtacatcaaagaactcacagaggagagaagccaaatgaatgtaaggaatgtgggaaaaccttcttctgtcagtcagcccttactgcgcatcagagaattcacacaggggaaaaaccctatgaatgtagtgaatgtgagaaaaccttcttttgtcaatctgccctcaatgtgcatcgaagaagtcatacaggagagaagccctatgaatgcagtcaatgtggaaaatttttatgtacgaaatcagccctcattgcacatcagataactcatagaggaaagaagtcttatgaatgtaatgaatgtgggaaatttttctgccataagtcaacactcactatacatcagagaacacacacaggagagaaacatggtgtgtttaataaatgtggtagaatctccattgtgaagtcaaactgcagtcagtgtaagagaatgaacacaaaggagaatctttatgagtgtagtgaacatgggcatgccgtcagcaaaaactcacacctcattgtacatcagagaactatatgggagagaccatatgaatgcaatgaatgtgggagaacctactgcaggaagtcagccctgactcaccatcagagaacacacacaggacagagaccctatgagtgtaatgaatgtgggaaaaccttctgtcagaagttctcctttgttgaacatcagcgaactcacactggggagaaaccatatgaatgtaatgaatgtgggaaatccttctgccataagtcagccttcagagtccatagaagaattcacacaggagagaaaccatatgaatgtaatcaatgtgggaaaacctaccgtcgcctgtggactctcactgaacatcagaaaatacacacaggagagaaaccttatgaatgtaacaaatgtgagaaaacatttcgccacaaatcaaactttcttttacatcagaaatcccacaaggaataagttccaacaaagtaataaattccaacaaagcaacaaatcaaataacttacacaatgctaaactgtgagtatgtatagaggagtaaaatcttataaatgtaatgaatatggaaaatttttctgccataagtcaaccctcaatgtaacatcagagaaatcatgtaggaaagaaataatttgtttaataaatgtattattcattgtgaactatgaaaatattcaacagcaaaaaaaaaaaaaa

SEQ ID NO: 1336 - DNA, 4462 bp, Homo sapiens
cgcagcggaggaaagaggatggcgacctcgtcgatgccggagtcagagaggaacgtggctacgaaagcctcggagtgaagttcccagaccctacgccccgctgtcaggcagcccgccgatcagatggaggagaacgaggtggagagcagcagcgacgcggcccctgggcctggccggcccgaggagccctctgagagcggcctgggtgtgggcacctcagaagccgtgtccgccgacagcagcgacgccgcggccgccccggggcaggcagaggccgatgactctggcgtggggcaaagctcggaccgcggcagccgttctcaggaggaggtatctgagagcagctcgagcgcagaccccctgcctaatagctacctccctgattcatcgtctgtgtctcatgggccagtggcaggggtgacaggcggtcccccagcacttgtgcactctagtgcactcccagaccccaacatgctggtgtccgactgcacagcttcctcctcggacctgggctcggccatcgacaagatcatcgagtccaccatcgggcccgacctcatccagaactgcatcactgtgaccagtgctgaggatggcggggccgagaccacacggtacctgatcctacagggcccagatgatggagcccccatgacatcaccaatgtccagttccaccttggcccacagcctagcagccattgaggccctggcagatggccccacatccacatccacatgcctggaggcacagggtgggcccagctccccggtgcagctgcccccagcctccggtgccgaagagccggacctgcagagcctggaggccatgatggaggtggtggtggtgcagcagttcaaatgcaagatgtgccagtaccggagcagcaccaaggccacactgctgcgccacatgcgggaacgccacttccgtccagtagcagcagccgcagcagcagctggtaaaaaaggacgtctacggaagtggagcacctccaccaagagccaagaggaagagggaccagaggaggaggacgatgatgacattgtagacgctggagccattgatgacctggaggaggatagcgactataatccagctgaggatgagccccgaggccggcagcttcggctccagcgccccacccccagtaccccaaggccccgaaggagacctggccggccccggaagctgccccgcctggagatctcagacctcccagatggtgtggaaggagagcctctagtgagttcccagagtggacagagccctccagagccacaggatcccgaggctcccagctcctcaggcccaggacacctggtggccatgggcaaggtgagcaggacccctgtggaagctggtgtgagccagtcagatgcagagaacgcagccccctcctgcccggatgagcatgacactctgccccggcgccgaggtcgaccttccaggcgcttcctaggcaagaaataccgcaagtactattacaagtcgcccaaaccacttttgaggcccttcctgtgccgcatctgtggttctcgctttctgtcccacgaggacctgcgcttccacgtcaactcccatgaggctggcgatccccagctcttcaagtgcctgcagtgcagctatcgttcccgccgctggtcctcgctcaaggagcacatgttcaaccacgtgggcagcaagccctacaagtgtgacgagtgcagctacaccagtgtctaccggaaggacgtcattcggcacgccgctgtgcacagccgggaccggaagaagaggccagatccgactccaaagctgagctctttcccctgccctgtgtgtggccgtgtgtaccccatgcagaaaagactcacgcagcacatgaagacgcacagcactgagaagccccacatgtgtgacaagtgtggaaagtcctttaagaagcgctacaccttcaaaatgcacctgctcacgcacatccaggctgttgccaaccgcaggttcaagtgtgagttctgtgagtttgtttgtgaagacaagaaggcactgctgaaccaccagttgtcccacgtcagtgacaagcccttcaaatgcagcttttgtccctaccgcaccttccgagaggacttcttgctgtcccatgtggctgtcaagcacacaggggccaagcccttcgcctgtgagtactgccacttcagcacacggcacaagaagaacctgcgcctgcacgtacggtgccgacacgcaagcagcttcgaggaatgggggaggcgccaccctgaggagcccccctcccgccgtcgccccttcttctctctgcagcagattgaggagctgaagcagcagcacagtgcggcccctggaccacctcccagttccccaggacctcctgagatacccccagaggcgacaactttccagtcatctgaggctccctcattgctctgttctgacaccctgggcggcgccaccatcatctaccagcaaggagctgaggagtcgacagcgatggccacgcagacagccttggatcttctgctgaacatgagtgctcagcgggaactggggggcacagccctgcaggtggctgtggtgaagtcggaagatgtggaagcagggttagcatcccctggtgggcagccctcccctgaaggtgccactccacaggtggtcaccctccacgtggcagagccagggggcggtgcagcagccgagagccagctaggccctcctgacctaccgcagatcaccctggcacctggtccatttggtgggactggctacagtgtcatcacagcaccccctatggaggagggaacatcagctcctggcacaccttacagcgaggagcccgcaggagaggcagcccaggctgtggttgtgagtgacaccctaaaagaagctggcacccactacatcatggctactgatggtacccagttgcaccacattgagctcaccgcagatggctccatctccttcccaagtccagatgctctggcctctggtgccaaatggcccctgctgcagtgtgggggactgcccagagacggccctgagcccccatctccagccaagacccactgcgtaggggactcccagagctctgcctcctcacctcctgcaaccagcaaagccctgggcctggcagtgcccccgtcaccgccatctgcagccactgctgcatcaaagaagttttcctgcaagatctgtgccgaggccttccctggccgagctgagatggagagtcacaagcgggcccacgctgggcctggtgccttcaagtgccccgactgccccttcagtgcccgccagtggcccgaggtccgggcgcacatggcacagcactcaagcctacggccccaccagtgtagccagtgcagctttgcctccaagaacaagaaggacctgcgtcggcacatgctgactcacacaaaggagaagccttttgcatgccacctctgcgggcagcgtttcaaccgtaacgggcacctcaagttccacatccagcggctgcacagtcctgatgggaggaagtcaggaacccctacagcccgggcccctacccagaccccaacccagaccatcatcctgaacagtgatgacgaaacactggccaccctgcacactgcactccagtccagtcacggggtcctgggcccagagcggctacagcaggcactgagccaggaacacatcatcgttgcccaggaacagacagtgaccaatcaggaggaagccgcctacatccaagagatcaccacggcagatggccagaccgtacagcacctggtgacctccgacaaccaggtgcagtatatcatctcccaggatggtgtccagcacctgctcccccaggaatatgttgtggtccctgaaggccatcacatccaggtacaggagggccagatcacacacatccagtatgaacaaggagccccgttccttcaggagtcccagatccagtatgtgcctgtgtccccaggccagcagcttgtcacacaggctcaacttgaggctgcagcacactcagctgtcacagcagtggctgatgctgccatggcccaagcccagggcctgtttggtacagacgagacagtgcccgaacacattcaacagctgcagcaccagggcatcgagtacgacgtcatcaccctggccgatgactgagccccgagggcccaacacagatcatggatttgcggccagctctcctgggggtagggggccaccaggactcacctccctcttcatttaggatctccagatactggatagccagcatcctctcattcccagggagccagacctgtgctgttggggttaggggcagccatgggccccagccaggacatgctgggtgccccagcctgcaggcaggctttgggagagaaatttatttttgtttgggtggacccactggcctgtcagtctcaataaagggaccggagtccagtcctgaacagcttaaaaaaaaaaa

SEQ ID NO: 1337 - DNA, 4752 bp, Homo sapiens
atggaaagcggtgcagttctgctggaatccaaatcctccccatttaacctactgcatgagatgcatgagcttcgcctcctgggtcacctgtgtgacgtgacagtcagcgtggagtatcagggtgtccgcaaagacttcatggcccacaaggcagtgctggctgccaccagcaagttttttaaggaagtgttccttaatgagaagagtgtggatggtactaggactaatgtctacttaaatgaagtgcaggttgctgactttgcttcatttcttgagtttgtctacactgcaaaggtacaggtggaagaagatcgggtgcagcgaatgctggaagtggctgaaaagctgaaatgtttggatttatcagaaacttgttttcaattaaagaaacagatgttagagtcagtacttttggagttgcaaaatttctcagagtctcaggaggtggaggtgagcagtggctcccaagttagtgctgctcctgcccccagggcaagtgtggccaccgatggccctcaccccagtggtctcacggattccttggactacccaggagagagagccagcaatggcatgtcttcagatttgccaccgaagaagtccaaggacaaactagacaagaagaaagaggtagttaaacctccctaccctaaaatcaggagagctagtggaaggctggctgggaggaaggtctttgtggagatccctaaaaagaaatatacgagaagactccgagagcagcagaaaactgctgagggtgatgtgggggactacaggtgtccccaggaccaaagcccggacagggtgggcacggagatggagcaggtttccaaaaatgagggttgccaggcaggtgctgagttggaggaattgtcaaagaaagcagggccggaggaggaagaggaggaggaggaggaggacgaagaaggggagaagaagaagagcaactttaagtgcagcatttgcgagaaggcgtttctgtatgagaagagcttcctgaagcacagcaagcaccgccacggcgtggccaccgaggtggtgtaccgctgcgacacctgcggccagaccttcgccaaccgctgcaacctgaagagccaccagcgccacgtgcacagcagcgagcgccatttcccatgcgagctgtgcgggaagaagttcaagcgcaagaaggacgtgaagcggcacgtgctgcaggtgcatgagggcggcggcgagcggcaccgctgcggccagtgcggcaagggcctgagttccaagacagcgctgcggctgcacgagcgcacacacacgggagaccggccctacggctgcaccgagtgcggcgccaggttctcgcagccgtccgcgctcaagacgcacatgagaattcatacaggggaaaaaccttttgtctgtgatgaatgtggtgcaagattcactcagaaccacatgctgatttatcataaaaggtgtcacacaggtgaaagaccttttatgtgtgaaacatgtggcaagagttttgcttctaaggagtacttaaaacaccacaatagaatccatactggatccaaaccctttaaatgtgaagtatgtttcaggacttttgcccagcggaattcactgtaccagcatattaaagtccacacaggggagcgtccctactgctgtgaccagtgcggcaagcagttcacccagctcaacgccctccagcgccaccgccgcatccacacaggggagaggccattcatgtgcaatgcgtgcggacggacattcaccgacaagtccactcttcggcggcacacctcaatacacgataagaatactccatggaagtctttccttgtcattgtagatggctcgcccaagaacgatgacggacacaagactgaacagcctgacgaagagtatgtgtcatccaagctttcggataaattgctgtcttttgcagaaaatggccatttccacaacctggctgcagtccaagacactgtacctaccatgcaggagaacagttctgctgacacagcctgcaaggcagatgactccgtggtgtcccaggacaccctcctggccaccaccatcagtgagcttagcgagctgaccccacagacagactcgatgcccacacagcttcactctttgagcaacatggaataagagcttcaagcagttcccatcctgttagtctgcgtgtgtggtagctgaactcaagatgatgtggggctaagaaaaataattgtccatgtgcaaagatgtgggcaagaatggcctctgcagattttcctgaacttctgctaacttgcacggctttatcacagcatttttaaagctttccctcaaaaatcctgatctgcatgatctcagctactttattgacaaaaaggcagtgaacataacctcacttaattctggtgtagggtgtatgtgctaatcgttctaattcttgattacctagtttatagataactgctggtcttaattgcagagtacagagaactgaaccagctcctgatattgtagttagcagtcttcctggcttctcactctgccttatatttccatgtgggtttacttctctcataactactttcaaggtatttttcttccaagctgaaataaaactggggccacatattttcagtcatttcttccctgttgaattgaagcaaatcagattttctgtggggaccctcaaatgcaactgaagaaatagattgttgcattcattcctccccaccccccatttgtaggcagtaaacaaagtatgactgacagattgaacacctgcaaaactgctagcgtaatctcagcacatacgcagctaggaagtttgtcataaaatcaacttagaaatgagatgaggctgttcagtttgtcttaaaaaaatcagattaggtaaaagctgtcctaccaaagagtctagcaaaacaatatagtatttttttgcagaggcatgaaaaattaagacgctttagagtacttgaaagttgtgtagtcattttatttgcaaaatgaggtgactgtggcaaattatagaacacagagtattattacttttgccaggtttttctgacttgatttctgtaatttccagaaacccagacttctcatttccacacctagagatggaaacaggcaagtaactgacatgtctatttccttgggagcatgtgagaacatagcagtagggaccaaaagtctcagcacacttacctccgattatgccttaaagagttgattgtgaagaaccagtaactttgtcccaaatgcttctttggctgtttcatgcaggacttaattattgcttttaaaaattcacaatgaaaagacgattctgctgtatttgttaaacgttgacatttggttctagggccttgagtatgtgccacgtgcttgtgaaatgctatgattcacatgtaacatttaaacattaatttaaaaagggaaccttggagaattcttttgttcactagttccttttttctctacatttttaatttattaaacttgctgtgaaaacactttgattttctaagaggaaggtactttaagttccagaatgaacatgtagctgcactatgccagaaattaatgagggaagactttcttcctaagtgcttatgttttaacttatgttagtgaaaccactacaaggtgtttcaggcgctgataacatgcttcacacctgcccttggaggtcacagtactaatttacttcaaatttagttatgacagtgtcactgtatcctagttatgtttacagcacaaataaataatgactgtcatacatccagaggagaccgaacctgcccagctgatgtactgttttatggaataaagtcacttgatcagaaggaattgaaacaatagatcattttgttacctactggagggatttttgtcttgaatttgtttccttagaaattctacaaaaaaatgttgttaataaatgtctgctttgtaaaagcagttttgcaattttttaaagatctatttctgttataatttaggttctgcagaaatatgattcttaattgaaacatataatttgcttaattacgtgaataatgaaatgtaaaatccgggtccataagcctttatttcatacagtcctaggattaagctgtttaactgcttggatcccagttggtctctggcagtgggatcctggagaggagaaatcctggcctctgctcatgcgcaggccacaaccgggctggaagtgcggttgagctctctgccactttcttcaatgtaaaaagtaggcatcaaagatacgacttctactatatacatttctctgtccctgagaacagagaaacgtaaccctgtaggggactggttacagaggacctcctggagcatctgccccattcctccaagtccaagcacagccatgctgagtggaagcgaggccaccatctgagtggattggtcccaagtgtgtaatgaggaaagtggccaggtgccggcacagtgcctctcccagagcctcaagaagggccatttaggagcttgcttcaaccattttccaaccattttctgtgaaatgctgtcagcccaaactccaaagggatgtgcagcctttcgttttaccaaattctttgctgtcgtttggaaaaaatgggccatgtggtggagacctttatttaaggtgatttttacagaaatgtgattttgctgtaggtgattatccaaacaagtaaatttgagtgtataatttaatttttaacctgttaaataaaccttgtccctccaaggaaaaaaaaaaaa

SEQ ID NO: 1338 - DNA, 2328 bp, Homo sapiens
gaggacacactcaggagagaagccttttctgtgcaaggtgtgtggacgaggctataccagtaagtcatacctcactgtgcatgagagaacacacacaggagagaagccttatgaatgccaggagtgtgggcgaaggtttaacgataagtcctcatacaacaagcacttgaaggcgcattcaggggagaagccttttgtgtgcaaggagtgtgggcgaggctatactaataagtcatacttcgttgtgcacaagagaatacactcaggagagaagccttacagatgccaggagtgtggccgaggctttagcaataagtcacaccttatcacacaccagaggacacactcaggggagaagccctttgcgtgcaggcagtgtaagcaaagttttagcgtgaaaggaagtctcctcagacaccagagaacacactcaggggagaagccttttgtgtgcaaggattgtgagcgaagctttagccaaaagtcaactcttgtctaccaccagagaacacactcaggggagaaaccttttgtttgtagagaatgtgggcaaggatttattcagaagtcaacccttgtgaaacatcagatcacacactcagaggagaagccttttgtgtgcaaggactgtggacgaggctttatccaaaagtcaaccttcgctttacaccagaggacacactcagaggagaagccttatggatgtcgggagtgtgggcgtaggtttcgggataagtcctcctataacaagcacctgagggcacacttgggtgagaaacgttttttctgcagggattgtgggcgaggctttaccttgaagccaaatctcaccatacatcagaggacacactcaggagagaagcccttcatgtgcaagcagtgtgagaaaagttttagtttgaaggcaaatcttcttagacatcagtggacacactcgggggaaaggccatttaattgcaaggattgcgggcgaggcttcatcctaaaatcaactctcctcttccaccagaagacacactcaggggagaagcctttcatctgtagtgaatgtgggcaaggatttatctggaagtcaaatcttgtgaaacaccagcttgcacattctggcaagcagccttttgtatgcaaggagtgtgggcgaggcttcaactggaagggaaatctcctcacacaccagaggacacactcaggggtgaagcccttcgtgtgtaatgtgtgtgggcaaggcttcagctggaagagaagtctcaccagacaccactggcggatacactcaaaggagaagccttttgtttgccaggagtgtaagcgaggctataccagtaagtcagacctcactgtgcatgaaagaatacacacaggagagaggccttatgaatgccaagagtgtggacgaaagtttagcaataagtcatactacagtaagcacttaaagagacacttacgtgagaagcgtttttgtacagggagtgtgggtgaggcttcatcttgaagttatatctcaccatccatcagaggacacactcaggagagtaactttgctttgttacaagctttagttgaggctgcataacttgttcgtgaagatataacagaggcagacagaatccagagggctacagagaacctgaattcaacccatgtgtccccaagagattcagagaaaagaggtcaatgtttagggaacagagatgccagttgaggggagggcattacctgggctattggggaaatgtggtctctttcctactgagcacatattcttgttgtatttgtgccaggctgtgctttctaaggactgctcttagccagtgactgcagagcagggataccagggcaggcctgttacactctccccaacctccttggactgcaaacaatctaggacacctccatcaaacctcctcttgcactttccctctggcttccctcccagccttccttggtttggatgttttgtcccctccttaatttatgttgaaactctacataaactgtttactgttgaaacagtgtaagtattaggaggtgggacctttgggaagtggttaagtcaagtcacgaagatagagctttgcgaatgggatcaggtgcccttatgaaaaggcttgatagagggagtttgtcctgtggcccttctattttctgctctgtgaggacacaatgctcctcccttccaaaagatgcagcatgaaggcatcatcttggaaacagacatgagccctcaacagacaactgcacctactgatgttttgatgttgaacttcccagcctccagaactctgggaaaataaagtcctctttatacaaaaaaaaaaaaaaaaaaaa

SEQ ID NO: 1339 - DNA, 1555 bp, Homo sapiens
ttttccccggcgtggtctcactcgcgatttaaggcataggtgtcgccgagccgggaggctgggagtcgccaggcgtgcgggggagaggcctgggccgcgccgcggcggggggtggaggaagagggcaggcgaggcgggaaggtgggctctggccgccgggagccggggacggagccgccgccgttgcccctagcggggagcagccgggaggagggggccgcagtcgggagaggggaccccaccatgcccaaagtcttcctggtgaagaggaggagcctgggggtctcggtccgcagctgggatgagctcccggatgagaaaagggcagacacctacatcccagtgggcctaggccgcctgctccacgacccccccgaggactgccgcagcgacggcggcagcagcagcggcagcggcagcagcagcgcgggggagcctggaggagcagagagcagctcgtccccgcacgcccccgagagcgaaacccccgagcccggcgacgccgagggccccgatggacacctggcgaccaagcagcgcccggtcgccagatcgaaaatcaagttcaccacaggcacgtgcagcgactcggtggttcacagctgtgacctgtgtggcaagggcttccgtctgcagcgcatgctgaaccgtcacctcaagtgccacaaccaggtgaaaagacacctgtgcaccttctgcggcaagggcttcaacgacaccttcgacctgaagaggcacgtccgcacacacacaggcattcgtccctacaaatgcaacgtctgcaataaagccttcacccagcgctgctctctggagtcccacctgaagaaaatccatggggtgcagcagcagtatgcctataagcagcggcgggacaagctctacgtctgcgaggattgcggctacacgggccccacccaggaggacctgtacctgcacgtgaacagtgcccatccgggcagctcgtttctcaaaaagacatctaaaaaactggcagcccttctgcagggcaagctgacatccgcacaccaggagaataccagcctgagtgaggaggaggagaggaagtgaggagaaggaaggggaggacagacgttcacactgccacgtatgtctacgtggatttttggttttcagcttcccccaccccactggctcttcttaattagaagtgaccagttcacctctgtgtccttttgaaacatcagcagtagggtccattccaagattgtcagttaccgttagtgacgtcaggccctgtaacctgtgtcctgtctggcgcagttgctcacattcaccaaagtttgttttcatgatcctgatggccaagaacaccgtgtgggatttttttttcccccaaggattttcacacacggaaggagaggtatttcttagagagatcatcattttatggtgccttgaaataaaaatacttctacttgaaatgctgtttaagcaaggcaagtgaattttgttattctgaaagagtttacagaaactattttaataaatgaaatgttcttgtgaagcttttaaaagcaaaatggaacattga

SEQ ID NO: 1340 - DNA, 972 bp, Homo sapiens
gaattcacataggggagaaaccctataaatgtaatgagtgtggaaaagctttctgccataagtcagctctaattgtacatcagagaacccatacacaagaaaagccctataaatgtaatgaatgtggaaaatctttctgtgtaaaatcaggacttattttccatgagagaaagcacacgggggagaaaccctatgaatgcaatgaatgtgggaaattcttcaggcacaaatcatcactcacagtacatcacagggctcacacaggagagaaatcttgtcaatgtaatgaatgtggaaaaatcttttaccgtaaatcggaacttgctcaacatcagagatcacatacaggggaaaagccctatgaatgtaacacatgcaggaaaactttctctcaaaagtcaaatctcattgtacatcagagaagacatataggagaaaaccttatgaatgaaatggatattagaaatttccagccacaagtcagcctccataatgcctcagagtattcacactgtggagaaagccctgatgacatcctgaatgttcagtaactatccacaaactcaccttatgttactccaaagtaatagtaggggataaacccatagactacaacaattataggacagcttttgttaggaagtgatattctatgtaatatcagatggttaatacgggcataacaccttacagattttttttgaatttgtgaaagtttttggcaaaaatgcaaataaggttatgttagaatttacactgaggagaaaattgtcaatttaagaaatctaaagtgaaaattttgcttagaaataaaatacgacaagttatgttttgagtttgatgccataatagtttttagggcacctaacaataatttatagatgtatattgtggaatgtaaagctttaagaacttaaacaaaggtaataattaaaataacctcacaagaagtttaatgagtagagagaattc

SEQ ID NO: 1341 - DNA, 3330 bp, Homo sapiens
gcgacggcggcggctccaagatggcgcaggcgatctttgaggccctggagggaatggacaatcagaccgttctggctgtccagtcattattggatggccaaggagcagtccctgatccgacaggccagagtgtcaatgcgccccctgctatccagccattggatgacgaggatgtatttctctgcgggaagtgtaagaagcaattcaactcgctgccagcgtttatgacccacaagcgggaacagtgccaggggaatgcccccgccctggccacagtctcactggccaccaacagcatctacccaccttcggcagcacccacagcggtccagcaggccccaactcctgccaatcgccagatctccacatacatcacagtgcccccgtccccactgatccagaccctggtgcaggggaacatcttggtgagcgatgatgtgctcatgtctgccatgtcagccttcacatccctggaccagcccatgccccagggccccccacctgtgcagagcagcctgaacatgcattccgtgcccagctacctcacccagcctccacctcctcctccacctcctccaccactgcccccaccgccaccacctcagcctccaccacctccaccccagagcctgggcccccctgggcgtcccaaccctggtgggaacggtgtggtggaggtgtacagtgctgctgcgcccctggctgggagtggaacggtggagatccaggcactggggatgcagccctacccacccctagaggtgccaaaccagtgtgtggagcctccagtatatcccacccccacagtgtacagccctggcaaacagggattcaaacccaaaggaccaaaccccgccgcccccatgaccagcgccaccgggggcacggtggccacctttgactctccagcaacgctgaagacccgacgagctaaagctgcagggaagccaaaggctcagaaactcaagtgctcatactgtgacaagtcattcaccaaaaactttgacctgcagcagcacatccgaagccacaccggtgagaagcccttccagtgcattgcatgtggccgtgcctttgcccagaagtctaatgttaagaaacacatgcagacccacaaggtgtggcctccaggacacagtggtggcaccgtgtctcgaaactctgtgaccgtacaggtcatggccctgaaccccagcaggcaggaggacgaggaaagcacagggttgggccagcccctgccgggtgcgccacagccccaggccttgtccacagctggtgaggaagagggggacaagccggagtccaagcaggtggtcctcatcgacagctcctacctgtgccaattctgccccagcaaattcagcacctacttccagctcaagtctcacatgacccagcataagaatgagcaggtgtacaagtgtgtggtcaaaagctgtgcccagacgttcccaaagctcgacacatttctggagcacatcaagagccaccaggaggagctgagctaccgctgccacctctgcggcaaggacttcccctcgctgtacgacctgggcgtgcaccagtactcccacagcctcctgccacagcacagccccaagaaggacaatgccgtctacaagtgtgtcaaatgtgtcaacaaatactccacccctgaggccctggagcaccacctgcagaccgccactcacaacttcccctgcccacactgccagaaggtgtttccttgtgaacgctacctgcggcgtcatctgcccacccacggcagcgggggcaggttcaagtgccaagtgtgcaagaagttcttccggcgggagcattatctcaaactgcatgctcacatccactcgggtgagaagccctacaaatgctcagtgtgcgagtctgcgttcaaccgcaaggacaaactgaagagacacatgttgatccacgagcccttcaagaaatacaaatgccctttctcgacgcacacaggctgcagtaaggagttcaaccggccggacaagctgaaggcccacatcctctcccactctggcatgaagctccacaaatgcgccctgtgcagcaagtccttcagccgccgtgcccacctcgccgagcatcagcgcgcccacacgggcaactacaagttccgctgtgctggctgcgccaagggcttttcccgccacaaatacctcaaagatcaccgctgtcgtctcggcccccaaaaggacaaggacctgcaaacccggcggcccccccagaggagggcagccccccgcagttgcggcagtggtgggcgcaaggtgctgacccccttgcctgacccgctggggctggaggagctgaaggacacaggggctgggctggtgcccgaggctgtccccggcaagccgcccttcgcagagccggacgcggtgctgtccatcgttgtgggtggtgcggtgggcgcggaaactgagctggtggtacctggacacgctgaggggctgggctccaacctggctctggcggagctgcaggctggggccgagggcccatgtgccatgctcgctgtgcccgtctacatccaggcctccgagtgacggacctgaggtgtctgtttcctgggcaggcctgatgctcctgtttgggtccagggcccctgggggcagaccggtgatccttaccagtggaagcgagccatcgagccattggcagaaatcctgctgaatgtcattcagaaacctcagcccatggtcgccctcctgtgcccctctcctgccggaaagccctgcaacattctagggttgggggcagggccatccacggtttctgggcagagccatggtggcaggagagagatggctgaagcctgagcagcccagagtcccgctggtctaggctggtggtcggggcccctgggagaggagacagggcattcctccccactctgtctccaggctgcctctgggtagcctctagtctgctgttcttcaggaggcctgccataaactcttcggagtttacgtgttgcaccttttcacagacggttccccacagcatcctcagacagctctgtgatgtagcttttaggaggcactcaggtgtcacggctagactgcagctatgagacagatctggcttcaaatccaagagttgccatgcacttgctgtgtgaccttgggcaagtcacttcacttctctgagccccgtgttcctcatctgtacaatggggcttacgatactactacctcatagggttgtcctggggatccagtatgatgaagtgcgccaggggcttggcatggtgcccggcacgcagaaagtgctcaataaatgtttttgtcataacgtgaaaaaaaaaaaaaa

SEQ ID NO: 1342 - DNA, 1604 bp, Homo sapiens
cctccgcccgcccgcctgcctgcctgcccgcccgctcgctcgcccggcccgcgactcatgtcccgccgcaaggccggcagcgcgccccgccgagtagagcccgcgcccgccgccaacccagacgacgagatggaaatgcaggacctcgtcatcgaactcaagcccgagccagacgcgcagccccaacaggccccaaggctggggcccttctccccgaaggaggtgtcctcggcggggcggttcggcggcgaaccccaccactcccctggccccatgcccgccggggccgccctcctcgccctcggcccgcggaacccgtggaccctgtggacgccgttgaccccgaactatcccgaccgccagccctggaccgacaaacacccagatctgttgacctgcggccgctgcctgcagaccttcccgttggaggccatcactgccttcatggaccacaagaagctgggctgtcagctcttcagaggccccagccgcggccagggctcagaacgagaggagctgaaggccttgagctgcctgcgctgtggcaaacagttcacagtggcctggaagctgctgcgtcacgcccagtgggaccacggactgtccatctaccagacagaatcagaggccccggaggccccgctcctgggcctggccgaggtggctgcagccgtgtcggcagtggtggggccagcagctgaggccaagagcccccgtgcaagtggcagcggcctcacccggcggagccccacctgtcctgtgtgcaagaagaccctcagctccttcagcaacctcaaagtgcacatgcgctcacacacaggcgagcggccctatgcttgcgaccagtgtccctacgcctgcgcccagagcagcaagctcaaccgccacaagaagacccaccggcaggtgccgccccagagccccctcatggccgacaccagccaggagcaggcctctgcagcccctccggagccggctgtccatgctgctgcccccaccagcacccttccatgcagcggtggtgagggggctggagccgccgccacagcaggtgtccaggaacccggggctcctggcagtggggctcaagccggccctggtggagacacttggggagccatcaccacggaacaaagaactgaccctgcaaacagccagaaggcatcacccaaaaagatgcccaagtcagggggcaagagccgcgggcccgggggcagctgtgagttctgcgggaagcattttaccaacagcagcaacctgacggtgcaccggcgctcacacaccggggagcgcccctacacctgtgagttctgcaactacgcctgcgcccagagcagtaagctcaaccgccaccgccgcatgcacggcatgacgcctggcagcacccgcttcgagtgcccccactgccatgtgcccttcggcctgcgagccaccctggacaaacacctgcggcagaagcaccctgaggcggccggcgaggcctgagcccaggaaagcccccctcactgtccctggtaccgctgccaacacccattgacctcctcgtttttgcccgccttctccaagtaaattttcccttttatttaaaaaaaaaaaaaaaaaaa

SEQ ID NO: 1343 - DNA, 4242 bp, Homo sapiens
acgcgcagttttctgcagttccggaagcggatcgtgttgggtgcgggtgacgccgccgagcgaagaacccttgaagaagaggaagaggaaagaaagacaagtcaggcatggctctcacccagggacaggtgacattcagggatgtggctatagaattctctcaggaggagtggacatgcctggaccccgctcagaggactttgtacagggacgtgatgttggagaattataggaacctggcctccctgggaatctcttgttttgacctcagtattatctctatgttggagcaagggaaggagcctttcactttggagagccaagtacaaatagcaggaaacccagatggatgggaatggatcaaagctgtgatcacagctctctcttccgaatttgtaatgaaagatttactacacaaagggaagagtaatacaggagaagtattccaaacagtgatgttggaaagacaggaaagccaagacattgaaggatgttccttcagggaagtccagaaaaatacacatggccttgagtatcaatgcagagatgctgaaggaaattacaaaggagtgcttttgacccaagaaggcaatctcactcatggaagagatgaacatgataaaagagatgcaagaaacaagcttattaaaaatcagcttggattaagccttcagtcacatctgcctgaactgcagctttttcaatatgaagggaaaatttatgaatgtaatcaggttgagaagtctttcaacaataattcctcagtttcaccacctcaacaaatgccttataatgtcaaaacccacatttctaagaaatatctcaaagattttatctcttctttattactcacacaggggcaaaaagcaaataattggggaagcccttacaaatctaatggatgtggcatggtctttcctcaaaattcacaccttgcaagtcatcagagaagtcatactaaagagaaaccttacaaatgttatgagtgtggcaaagcctttagaacacgttcaaacctaactacccatcaggtgatccatactggcgaaaaacgttacaaatgtaatgagtgtggtaaggtctttagtcgaaattcacaactctcacaacatcagaaaattcacactggagagaaaccttataaatgtaacgaatgtggcaaggtcttcactcagaattcacaccttgtaagacatcgaggaattcatactggagagaaaccttacaagtgtaatgagtgtgggaaagcctttagagctcgttcaagcttagctatccatcaggcaacccacagtggagaaaaaccttacaaatgtaatgaatgtggcaaggtcttcactcaaaattcacaccttacaaatcactggagaattcacactggagagaaaccttacaagtgtaatgagtgcggcaaagcctttggtgttcgttcaagcctagctattcatctggtaattcacaccggagaaaagccttacaaatgtcatgaatgcggcaaggtctttaggcgtaattcacaccttgcaaggcatcagctaattcatactggagagaaaccttataagtgtaatgagtgtggcaaagcctttagagcacattcaaacctaactacccatcaggtcatccatactggagaaaagccttacaaatgtaatgaatgtggcaaggtcttcactcaaaattcacaccttgcaaatcatcaaagaattcatactggagtgaagccttatatgtgtaatgagtgcggcaaagccttcagtgtgtattcaagcctaactacccatcaggtcatccatactggagaaaaaccttacaaatgtaatgagtgtggcaaggtcttcactcagaattcacaccttgcaagacatcggggaattcatactggagagaaaccttataaatgtaatgaatgtggcaaggtctttaggcataattcatacctttcaaggcatcagcgaattcatactggagagaaaccttacaagtataatgagtatggcaaagcctttagtgaacattcaaacctaactacccatcaggtcatccatactggtgaaaaaccttacaaatgtaatgagtgtggcaaggtcttcactcagaattcacaccttgcaagacatcggagagttcatactggaggtaaaccttaccagtgtaatgaatgtggcaaagcctttagtcaaacatcaaagcttgcaaggcatcagagagttcatactggagagaaaccatatgagtgtaatcagtgtgggaaagcctttagtgtccgttcaagcctaactacccatcaggcaatccatactggaaaaaaaccttacaaatgcaatgagtgtgggaaggtcttcactcagaattcacaccttgcaagacatcggggaattcatactggagagaaaccttacaagtgtaatgagtgtggcaaagcctttagtcaaacttcaaaacttgcaaggcatcagagaattcataccggagagaaaccatatgagtgtgggaaaccctttagtatctgttcaagcctaactacccatcagacaatccatactggtgggaaaccttacaaatgtaacgtgtggaaagttctaaagtcagagttcaaaccttgcaagccatcacagaattcatagtggagagaaaccttacaaatgaaggtggtaacttttgcagttagaattcattcctttgacaacgtcagagaatttatgcctgagagattccttgaaaatgcaatgactggctgggtgcagtggctcatgcctgtaatcccaacactttgggagtccgaggcaggtggatcacctgaggtcaggagttcaagaccagcctgaccaacatggcgaaaccccatttctactaaaagtacacaattagctaggcctggtggcgtgcgcctgtaatcccagctatataggaggctgaggcaggagaatcacttgaacccaggaggcggaggttgcagtgagccaagatcgtgccaatgcactccatcctgggcaaaaagagcaaaactccatcttaaaggaaaaaaaaaaaatgcaatgactgtggcaaactcctcatgagttcaagtattaatagacatccaagagtccataataatgagaaatcacataaatgtactgtgtgtgacagaggctttattcaggcctcacagctttgcaggcattaaaatctacgtatttgatggaaccacacaaatgtaatgtgtaagagcatcctgaagctcttactctaagactgtaactgtaggtgaggattcatacaaagagtgactcagtctctagttctttgattcacttttaaaatgataaactgcacaataattacacgttccaatatggtaaaacttaagacattatatatttcaaaggtcaaaggacatttggaaatggctacttaccttcaggttataaaatcttttattccattgtttgaggtttctcaaaaaggctactgtttgtgactttcaacctgaactatggatctgtggctattttgcatccttaagcacctttcgtggtgcctatctgggaaagaaccacagtatggaaaggcttacttcattacatgaggatcatttttatccatgtttattgaagaaggaggactctgccttgtaaaattaaatattctctcaattgagagaccatggttttggggcagaaaataatgtaaaactatgatatcaatcatcatactgattgtgttcagggtgcttttctgagagaaagacaccatgggttttagggaagtaaggctctacctgcattgagcaggccaagacctcaggacactggaatttttatgagaggagagtaataagttattagtgactgattatgtgatgggaatagtgcaggggaaatggttgccactttctctactgaatggcaatagctgttttatagcagagattgatgaaaaataggcttatttttgaaattgaagaggtaacagttattagagtggagagcttggtcagaaaaaccagaataccatggttttttttgttttgttttgtttttagtagaattcacactaattgctggaattacattttgctacagttttattaagaatgtgtcacagacataatgttttgctaaaaaaaattcaacgttttcttataactataaacaaatcacattctttgtaccaacatcattttatcctacctcagtaggatacttcatagcagataataacaatacactcagtcttttaggttggaaaaaaaaaaaa

SEQ ID NO: 1344 - DNA, 2664 bp, Homo sapiens
cattgttctcgtgccggtagaagctgaagtaccggtcagccagcctcctgctgcagagccagtgaactcaggtcgggcttctcagctgcgcacataggcagtactcatcttggccctgggaagaaactcaagaagaagcttttgaaacataaagcttggatggggtttgacctctgcagggcagcgcccagctataggagttcccctgctgagcagagaagatgactgcagaattgagagaagccatggccctagccccatggggcccagtgaaggtgaaaaaggaggaggaagaagaagaaaacttcccaggtcaggcatccagccaacaagtgcactccgagaacatcaaagtctgggccccagtgcagggtcttcagacaggccttgatggatcagaagaggaagaaaagggtcagaacatatcctgggatatggcggtagtcctgaaagcaactcaggaggcacctgctgcttcaacccttggcagctactcattaccagggactctggccaagagtgagatactggagactcatgggaccatgaactttctaggtgctgaaaccaagaacctacagttactggttccaaaaactgagatatgtgaggaagctgaaaaacccctcatcatatcagaaagaatccagaaagctgatcctcaaggacctgagttaggagaagcttgtgaaaagggaaacatgttaaagaggcagagaataaagagagaaaagaaagatttcagacaagtgatagtgaatgactgtcacttacctgaaagcttcaaagaagaggaaaaccagaaatgtaagaaatctggaggaaaatatagccttaattctggcgctgttaaaaatccaaaaacccagcttggacaaaagccttttacgtgtagcgtgtgtgggaaaggatttagtcagagtgcaaacctcgttgtgcatcagcgaatccacactggagagaaaccctttgaatgtcatgagtgtgggaaggccttcattcagagtgcaaacctcgttgtgcatcagagaatccacactggacagaaaccttatgtttgctcaaaatgtgggaaagccttcactcagagttcaaatctgactgtacatcaaaaaatccactccttagaaaaaacttttaagtgcaatgaatgtgagaaagcctttagttacagctcacaacttgctcggcaccagaaagtccacattacggaaaaatgctatgaatgtaatgaatgtgggaaaacatttactaggagctcaaacctcattgtccaccagaggatccacactggggagaagccctttgcctgtaacgactgtggcaaagcctttacccagagtgcaaatcttattgtacatcagcgaagccatactggtgagaagccatatgagtgtaaagagtgtgggaaagcctttagttgtttttcacaccttattgtgcaccagagaattcacactgcagagaaaccttacgactgcagcgaatgtgggaaagccttcagtcagctctcttgccttattgtccaccagagaattcacagtggagatcttccttacgtgtgtaatgaatgtgggaaggccttcacatgtagctcatacctacttattcatcagagaattcataatggagaaaaaccttacacatgtaatgagtgtgggaaggccttcagacagaggtcgagcctcaccgtgcaccagagaacccacactggggagaagccctatgaatgtgagaagtgtggtgcagctttcatttccaactcacacctcatgcgacaccatagaacccatcttgttgaataacaagtaaggaagaggaagacctccagcattggtcataaccttctgcctccctaatgagacacctctttgctgttttcttcctcctctataaaagtgagggctgtgtccttaaaagttatagttttcaggaatgcagcagaagacacaagaaaagcatttcagaggctaatttaaaacaaaaagtaagcacctaaaggcaaggactttgttttaactgtaccttaagcggtcatgttctctgaagtggaatgtggctttcctaggaatgggtcgtacaaagctaagtggtaatgatgctatttggggaaaggtcttttttgcttaattttgttttttaaaactctgatgattgcttgagcaacaggcaggttatctgcctggttgaattctggttgaaccgtgtattctaatatttctggttaagtggtgactgggtaaggaaaccacttggggtagcagttcaacaattcacttacgaatgtttataagctttccatttcctaggtaattttttaaaagccagtcaaaacaaaaactttactgaaaatggacagaaataggaaatggactttttccttactgtctatacctcctgaaccttggtattgtaaagatctggggacctctgggtctgttctgaccattccctagtctccatggccaagcactcaaggattgatggacaccacacaccagctatattcatttgccaagatcaacagctccttctccaaacaactcaagcccccaattcccatcgcattccatttgggtgagatgcaactaacagccccttcctggatgaaggagtcaaagaataaagcttgcctagaggcatgccccaaaaaaaaaaaaaaaa

SEQ ID NO: 1345 - DNA, 2358 bp, Homo sapiens
agcagtttacggaagtgtaacgttgaggcccttcttgtgtatctggagaaaatagaggttctgactcctcaggagcaaaaaacataacctgaagagggaggaagtggatttggggttcaccatttcttggggcacacttgattgaaaactgagacttctgaagagaaggccagaagatacaaagacagaccatcccagttgaatgctgtcttccaagaacagaagaaaatgatccaggcccaggaatccataacactggaggatgtggctgtggacttcacttgggaggagtggcaactcctgggcgctgctcagaaggacctgtaccgggatgtgatgttggagaactacagcaacctggtggcagtggggtatcaagccagcaaaccggatgcactcttcaagttggaacaaggagaacaactgtggacaattgaagatggaatccacagtggagcctgttcagacatatggaaagttgatcatgtgctggagcgcttgcagagtgaaagcctggtgaacagaaggaaaccatgtcatgaacatgatgcatttgaaaatattgttcattgcagcaaaagtcagtttctgttagggcaaaatcatgatatatttgacttacgtggaaaaagtttgaaatccaatttaactttagttaaccagagcaaaggctatgaaataaagaactctgttgagtttactggaaatggggactcctttcttcatgctaaccatgaacgacttcatactgcaattaaattccctgcaagtcaaaaactcatcagcactaagtcccaattcatcagtcccaagcatcagaaaacacgaaaattagagaagcatcatgtgtgcagtgaatgtgggaaagccttcatcaagaagtcttggctaactgatcaccaggtaatgcatacaggagagaaaccccacagatgtagtctatgtgagaaagccttctccagaaagttcatgcttactgaacatcagcgaactcatacaggagaaaaaccttatgaatgccctgaatgtggcaaagcctttctcaagaaatcacggctcaacatacatcagaaaacacataccggagagaaaccctatatatgcagtgaatgtggaaaaggcttcatccagaaaggaaatctcattgtacaccagcgaattcatacaggtgagaaaccttatatatgcaatgaatgtggaaaaggcttcattcagaagacgtgtctcatagcacatcagagatttcacacaggaaagacgccctttgtgtgcagtgaatgtggaaaatcctgttctcagaaatcaggtctcattaaacatcaaagaattcacacaggagagaaaccctttgaatgtagtgaatgtgggaaagcctttagcacaaagcaaaagctcattgtccatcaaaggactcatacaggagagagaccctatggctgtaacgagtgtgggaaagcgtttgcgtatatgtcgtgtctggttaagcataagagaatacacacaagggagaaacaagaggcagccaaggtggaaaatcctcctgcagagaggcacagctcattacacaccagtgatgtcatgcaggagaaaaactctgctaacggggcgactacacaagtgccttctgtggcccctcagacatcattaaacatcagcggcctcctcgcaaacaggaacgtagtccttgtgggacagccagtggtcagatgtgcagcctcaggagataacagaggatttgcacaggacagaaaccttgtgaatgcagtgaatgtggttgtgccttccgtgatcaattatgtcttattttatgttacagaaaacccataggaagaaaactcagatctatgtggaaaagggttgagcaaaaatttgtagttcattatgtggccgaaaagcatacactgagagaacatgtataaggctgagatagcctgataaactcatcctattaaaatgtatgctgtgatacacaggcaaatttgatgttaacctaagcacatacacagcaattgctcgactgtgtcaattaaatgagtaaaggaagcccaagtacttttaagtggaggaaatgaagtactgtgaatttttaaaacagatgagataattggtgtcgggagtgttgcagtgactgaaaagcttcataaggggcagttggtgggaaagggctaatactgtaatggtggaatgtgggacacatatgtgtcaattcagtttccttagaccagtgccagtgtggaggattaattgaaaaccaggaccataaactttcagaactttgtattatgcagagggatctgtgaaactagtcaatttgtttcattaaacaaatattttaaaattaaaaaaaaaaaaaaaaaa

SEQ ID NO: 1346 - DNA, 2555 bp, Homo sapiens
ccggcgcgccgcggggtgagcggcgccgggcctgaggtcgcccagacgccgtcggggcggagccgggtcgcgaggctgcatcccggccggcggttccggagcctcgcggctggggaggcgcggcccgggacgctcgagcttagggagatctgccttctggagactgcgccgtcctcccgggagagccagaaagaggacatggctgctgggcagcgggaagcgaggccccaggtgtcactgacgtttgaggatgtggctgtgctgtttacccgagatgagtggagaaagctggccccttctcagagaaacttgtaccgggatgtgatgctggagaactataggaacctggtctcactggggctcccatttaccaaaccaaaagtgatctccctgttgcagcaaggagaagatccctgggaggtggagaaagacggttctggcgtctcctctctaggatcgaagagcagtcataaaaccacaaagtcaacgcaaacacaagactcttcatttcagggactgatactgaaaagatccaacaggaatgtaccttgggatttgaaattagaaaagccttacatatatgaaggcagattagagaaaaagcaggataaaaagggaagttttcagatagtttcagccacccacaaaaaaatccccactatagaaagaagccataaaaatactgaattgagccaaaacttcagcccaaagtcagtgcttattaggcaacagatacttcccagagaaaaaacaccaccaaaatgtgaaatacaaggaaacagcctcaaacagaattcacaattacttaatcaaccaaaaattacagcagataaacgctataaatgtagtctgtgtgaaaaaaccttcattaacacttcatcccttcgtaaacatgagaaaaaccatagtggagagaaactatttaagtgtaaagaatgttcaaaagcctttagccaaagttcagctcttattcaacatcaaataacgcatactggagagaaaccctacatatgtaaagaatgtgggaaagcctttactctcagtacatccctttataaacatctaagaacccatactgtggagaaatcctacagatgtaaagaatgtggtaaatccttcagccgaaggtcaggcctttttatacatcaaaaaattcatgctgaagaaaacccttgtaagtataatccgggtaggaaggcatctagttgcagcacatccctttctggatgtcaaagaattcattctagaaagaagtcctacttatgtaatgaatgtggcaacacctttaagtctagctcatcccttcgttatcatcagagaattcacactggagagaagccttttaaatgtagtgaatgtgggagagccttcagccagagtgcctctcttattcaacatgaaagaattcacaccggagaaaagccctatagatgcaatgaatgtgggaaaggctttacttctatttcacgacttaatagacaccgaatcattcatactggagagaagttttataattgtaatgaatgtggtaaagccttaagctcccactcaacacttattattcacgagcgaattcatactggagaaaaaccatgtaaatgtaaagtatgtggaaaagccttcagacagagttcagctctcattcaacatcagagaatgcatactggagaaagaccctataaatgtaacgagtgtgggaaaacattcaggtgtaactcatcacttagtaatcaccagagaattcatactggagagaaaccatatcgatgtgaggaatgtgggatatcttttggccaaagttcagctcttattcagcatcgaaggattcatacaggagaaaaaccctttaaatgtaatacatgtggaaaaacttttagacaaagctcatcacgtattgcacatcagagaattcatactggagagaaaccctatgaatgtaatacatgtgggaaacttttcaaccataggtcatcccttactaatcattataaaattcatatcgaagaggacccctagaaagtagatttgtatgtgtgaaagccttaaaccaaagctcatcgaagaatacatccttgagagagatgtaataaatgtaatggatgtgaaaaaaactgtaataatttagccctcattaggtatttaattccatggataaacctcagctatataatagatatgaggaaagtgtttgtgcctgtcagacacttaaaaaaataacctgagatgaagaatttacaattgaagacattgactttagccatttgtgaaatgggtttgctttttcccttttcctacagacgtatatgctagatgtcacgtgatcatcagaaacagatatccgagtgggtggggaggtgtgctttagatttctcattagaagaccaccaaactggtaatatttttatagcattttaatagcttgatcaaattgtacctttttagagaaaaggaccaaaataaaagaaaaatgaattatgaactacctctcagtctctggggtttgtccttttcctaccctgatgtcaaacttatgcatggatttcattaaaaaagaa

SEQ ID NO: 1347 - DNA, 2003 bp, Homo sapiens
ggagcgcctggcggggccgctgggccgagggggccgccggcggggctggcgggcggggggcttcctgcgggcccggggggagccggcggccggcgcgggcgcggcgggccgggcaggggcgaggggcgccgggtcttgccccagaagctgcgggcacatccacgcctgaaatgcggcgctcagtcctggtcaggaacccaggccacaaaggcctgagacccgtttatgaagagctcgactctgactccgaggacctagaccccaatcctgaagatctggacccggtttctgaagacccagagcctgatcctgaagacctcaacactgtcccggaagacgtggaccccagctatgaagatctggagcccgtctcggaggatctggaccccgacgccgaagctccgggctcggaaccccaagatcccgaccccatgtcttcgagtttcgacctcgatccagatgtgattggccccgtacccctgattctcgatcctaacagcgacaccctcagccccggcgatccaaaagtggaccccatctcctctggcctcactgccaccccccaggtcttggccaccagccccgcggtgctccccgcccccgccagcccgccccggcccttctcctgcccggattgcgggcgagccttccgccgcagctccgggctgagccagcatcgccgcacgcacagcggcgagaagccgtaccgctgccccgactgcgggaagtccttcagccacggtgccaccctggctcagcaccgtggcatccacactggggcgcggccgtaccagtgcgcggcctgcggcaaggccttcggctggcgctccacgctgctgaaacatcgcagcagccacagcggggagaagccgcaccactgcccggtgtgtggcaaggccttcgggcacggctcgctcctggcacagcacctgcgcacgcacggcggcccgcggccccacaagtgcccggtgtgcgccaagggcttcggccagggctctgcgctgctcaaacacctgcgcacgcacacgggcgagcggccctacccgtgtccgcagtgcggcaaggccttcgggcagagctcggcgctgctgcagcaccagcgcacacacacggccgagcgcccctaccgctgcccccactgcggcaaagccttcgggcagagctccaacttgcaacaccacctgcgcatccacacgggcgagcggccctacgcctgcccgcactgctccaaggccttcggccagagctcagcgctgctccagcacctgcacgtgcattcgggcgagcgtccctatcgctgtcagctctgcgggaaggccttcggccaggcctccagcctcaccaagcacaaacgggtgcatgagggtgcagccgctgctgcagctgccgcggccgctgcagctgcagcagcggccgccggcctgggcctcgggcctggcctaagccctgcatccatgatgaggccggggcaggtctccctcctgggtcctgatgctgtttctgtgctcggctctggcttgggcctcagccctggcaccagctctggccgcaaccctgaccctggctctgggccgggcactctgccggatcccagctccaaacccctccccggctccagatccacccccagccctactcctgtggaatcttctgacccaaaggctgggcacgacgctggtcccgaccttgtgcccagcccagaccttgatcctgtgcccagcccagaccctgatcctgtgcccagccctgatcccaaccctgtgtcctgccctgacccctgttctcccactcgtggcactgtcagcccagccctccctaccggcgagagtccagagtgggtacaggagcaaggggcactgctggggcctgatggctgaaggagacgccggcatcctcgggggcctggggaagttgtgtgttgtgcagtcagtaaaatcctcccactgcctccggaaaaaaaaaaaaaaaaaaaaaaaaaaaaaaaaaaaaaaaaaaaaaaaaaa

SEQ ID NO: 1348 - DNA, 3505 bp, Homo sapiens
aggaatgagggatgtcagaatctggctcggaggaatctcagtagggacaacaggcaggagaattatgggagcgcatttccccagggtggtgaaaacaggaatgagaacgaggagtcaacctcaaaggctgaaacctcggaagattcagcatcacgcggggagacaacaggaagatcccagaaagagtttggagagaaacgtgaccaggagggcaaaacaggagaaagacagcagaaaaaccctgaggagaaaaccaggaaagagaaaagagattcagggccagctataggaaaggacaaaaaaaccatcacaggagagagaggtccaagggagaaggggaaaggattgggaagaagcttcagtctgagctccaacttcaccacccctgaagaagttcccacgggaacaaagtctcacagatgtgatgaatgtggtaaatgcttcacgagaagttcaagccttatccgccataaaataatccacactggagaaaagccctatgaatgtagtgagtgtgggaaagccttcagtcttaactccaaccttgtcctgcatcagaggatccacacaggagagaaacctcatgaatgtaacgagtgtggcaaggccttcagccacagttccaatctcatcctccatcagcgcatccactctggagagaaaccttatgaatgtaatgagtgcgggaaggccttcagccagagctcggacctcaccaagcatcagagaattcacacgggggagaaaccctatgaatgtagtgaatgtggaaaagctttcaaccgaaactcatacctgattttgcatcggagaattcacactcgagaaaagccctacaagtgcactaagtgtggcaaggccttcacccgcagctccaccctcactctgcatcacagaatccatgccagagagagagcctctgagtacagcccagcctcccttgatgcatttggcgcgttcctgaaaagttgtgtgtaaaggaagaatttgccatcaagccatttcccccttttgtttctaaaattatttcagagatgtgtgctcctggagggaaaaagaaatacagcctcaacagattaaaaaacaaaagtcacacttaaggatccttctagtcacatcagcagtgttctgcctttatgtagtagttgggcatataatccttccacacagcccctgcagggaaaggctaatcttacggataatccacgtgagatttccacacaagagaaaagcacacgcatagtgaaatgtcagtcttttcagtaatgaggatacctttaaggcactcttggactctcggcaaccacaacataatagttgaaagatcaagattggctccacgaaagtgatacggaggttaggatgctacttgctgcaaacaagccctactttggccaacatcctgcttatttctcaaaaaagagggacagtgaaaacaaaaacgacattgggacatgctgctcaaggtagttatatatacgataagttgtatatatgatcactggtagcctaccaaagctgtagaaatctaggactgtgctaatcagtatcaaaccaaagatttctatctcttcccgaaagagagggtatgtgcaccagtctacagttccaaaggactgcaacaaatgtagatggttctgtcctcatccctgagatcagttctactgaaatggcaacaacaactccaaatacatctctcccttcttgaaatccctaaagcactatcgcactcctaaatgcatttctccacaagttagcacttgattgtatactgtcttttaatccttcattgtttcatgtatgaagtttttaatcaccccctaacccccaaaaaagattcggttgtcaagggatatatttctatccctgccagcacagtgctggacatagtgagtactgaacacctaagaggcactcattcagactgacttctacaggacttctacgtgtgtgataaaagcctgtgaatcgtgagtccctgaaatatggtagcctggcccagcttctaaagaggaccttcgtagccacaaggcatgctaaacctctagggtctgatgctgtttttgttccaaatataaacgaaaggcactagtcagccgcctgcatagactttctaaacagtgagtaaataccatggaatgtcagaaatgactttatcatcgtcatcttgaagaaaaatatgaacactgatgaaggtcatttttttttttttgacatctttctgtggcaaacctcttagaattctttgcagttagctgctgaacagtatgatgatttggggattttctgaatcatttgtacttagatactggagttcagaagatgtgatttttgttgcttttcagaaaaaggaacgtggtagggagtgttttttcccacgcttttccagtaactttgcaaaagcattaattgttcactggcaattactaaatgtattttgttgctctgagaaactcagcagtgtactgagatgtggctggctgtgccatcgtcatagtgcacagtgacttttctgtttcttatcactaaagactgaggtgagggtatgaaactttcattggtcccatcgttgtgcgcagggtgcaactggctacctagaagctgatggcaggagactgttcacacacaggagattgtgagctgtgtaagtagtcatcgccactcaagtaggacaagggtcctacccaaggctaggaccgcctgcggaaacagaaacatagactgagaacaaacctcaagactatcagtgtgacctccccataacaagagaaccccatatatagtttgagactttcccttgagaaacttatactaaaactattactcatcagtcattcactgatcagcagctaaagtccatgagaccaaatggttttatatggaaccaacgaagtgggagctaaaactgcacagtggtcattctttggcctctccttggctttatgacttaaaccaactacaacttccctatagcttctaagcagtttcatcagcattacttgggaaaacgtgttgcaagtcaaccagtcactaggatatttctacccatgcaacggaagaaaaacccattactccagaagagtatatctaagtaactaaaatggaggcagaaaatgttttaaggattttcttcaaagaataagccacagcaatggttttgtagaaaactcctgtgcttttgagcaaggacttttgccctctagaaagcaactgaggccaggtgcggtgtcacgcctgtaatcccagcactttgggaggccgaggtgagcggatcacctgaggtcaggagttttgagaccagcctggccaacatggtaaaatcccgtctctactaaaattataaaaattagccgggcatgatggtgggcacctgtaatcccagctacttgggaggctgaggcaggagaatcacttgaacccaggaggcagaggttgcagtgagccaagattgcacactgcactccagcctgggtgactagcaaaactccatcctttagagcacatc

SEQ ID NO: 1349 - DNA, 5163 bp, Homo sapiens
atttgcgccgtgtagagttgcatgctgggaaacactgacgggcgcccttccagctgcgtcgaagcttctctggtttcgcattacatttcccagagggccttggggcacagtccaatgaggagcgagccgggtggccggctgaggggcgtgcttcatgctcgcgggatttttaaaaatggtttctcctggatcttatcccaactgcgcctgagaccttgtttcacctcctgatgtgctgggtgtggttaggcctcgagccgggagctatttgcctcccaggaggaagccagggcagggttccgcggggaatggcggtgagggagccactcgggacgcggaggccctaaaatgaagaagcttcggcctgaggcttcgggagcggcgagcagggaagtgggagtgtgtgtgagtgtgtgtgtgtgtgtgtgtgtgtgtgtgtgaataagccagaggctgcctggtggggccccgccgtggcccagtgactgagataattgtcttcgtctgtggggtaatgcgaacaagccccgttcccctaagccgtgatgcatgcggggttgacgcggccgggctctgtccccataaactgtgacacaggtgtgtgtagacgtctatgagggccatagcgccgggctgtaagggcatctgtaggggtgacgcagccgggctgtgtctctgcacctccgttctgtgcgaggtcaatgctggtggggtctgcagaggtggcacggccaggacgggtctccgtgtctctgaaatgtgcctttgcacttctgtcaggttgacagggacaggcagtgtccctctggtgtgagcgtctgtgggtgtgaaagggccagcgagtgtgcggctgtgactggtcgggatcgggcctgggtgcatggccttttgagtgagcacaggtgtgtgcgaccatgtcacctgtctttctagtgtctccgttgcttcctgtgccttggccttccagccatgtggtacctgctagggagcagtggtcccaaagtgacgtgagaggctctacgctattgtgaaaatgaccaagaagaaggcttcacaagtcacgagatggcagttttggagccagaagtgctctccgtgcacactacctggacgacaagaggaagtaacctcaagaatagaattccttttggggaagaaagagctggccttcaggaaaagcatcccggaggaggaagaagaagtgttatatgtcctaaagtaaggtttcaggccagcatccttcagaaaaagcatccccgaggaggaagacgaatcgttaaacatctgaaagggtcaggccagcatccttcagaaaaagcatccccgaggaggaagacgaatcgttaaacatcttaggtcagctctagcctctcggaatttgtcttcttcagtggaaaccccgagaagactgatcagttcttcagttctaaaacaatggcccagggtttggtgacgttcgccgacgtagccatagacttttctcaggaggagtgggcctgtctgaactctgctcagagggacctgtactgggacgtgatgctggagaactacagtaacttggtctcactggatttggagtcagcatatgaaaataagagtttacctacagaaaaaaacattcatgaaataagggcttccaaaaggaattcagatagaagaagtaaatcccttggccgtaactggatatgtgaaggtacgcttgaaagaccacagcgctccagagggaggtatgtcaatcagatgatcatcaattatgtcaaaagacctgctactagagaaggcacccctcctagaacacatcagagacatcataaggagaattcctttgaatgtaaggactgtgggaaggcctttagtcgtggctatcaacttagtcaacatcagaaaatccatactggtgagaaaccttatgaatgtaaagaatgtaagaaggccttccgttggggcaatcagcttactcaacatcaaaaaattcatactggggagaagccctacgaatgtaaagactgtgggaaggcttttcgatggggctcaagcctcgttattcataagaggattcatactggtgaaaaaccctatgaatgtaaagactgtggaaaggcctttcggcgtggtgatgagctcactcagcaccagagattccacactggggagaaagactacgaatgcaaagactgtgggaagacctttagccgtgtgtataaacttattcagcacaagagaattcatagtggggagaagccttacgagtgtaaagactgtgggaaggcttttatttgtggttcaagcctcattcagcataaaagaattcacacaggtgagaaaccctatgaatgtcaagaatgtgggaaggcctttactcgagtcaattaccttactcagcatcagaagatccacaccggtgagaagcctcacgaatgtaaggagtgtgggaaggcctttcgctggggttcgagcctcgttaagcacgagaggatacatacgggcgagaagccgtacaagtgcacagaatgtgggaaggccttcaattgtggctatcacctcactcagcacgagagaatccacacaggcgaaaccccgtataaatgtaaggagtgtgggaaggctttcatttatggatcgagcctcgtgaaacatgagagaattcataccggggtgaaaccctatgggtgtacagaatgtgggaagagctttagtcacggccatcagcttacacaacatcagaaaacgcacagtggggcgaaatcctacgaatgtaaggagtgcgggaaggcatgtaaccacctaaaccatctccgagaacatcagaggatccacaacagttgaagagccttttgaacgcagtagcccgctcgtatctatggtttcgctttccacagtttgttacctgcagtcaactgcagttcaaaaatattaaatggaaaattccagaaataaagaattttaagtctcaaatggtgtgcccttctgagtagcgtgatgaaatctctcgctgtccggctccagccggccggggatgtgagtcatcccttggtccagcacatccacgctgtatacgccacccaccctgctagtgacttagtagccgtcttggtgatcagatcaactatcccagcatcacagtgcctgtgcccaagcagtcctcactttgcttaacagtggccccagagagcaggagtagtgatgctggtgattcggatatgccaaagagaagccacaaagtgcttccttttaaatgaaaaggtgaaagttctcaacttaaaaaagaaaagaaaaaaatcatatactgaggttgctaagatctacatgacaataagatattttgggagagagatacgttcacataattttattacatatattgttacaattgttctattttgttagttactgttggtaatctcttactgtgcctaatttataaattaaactttagatatgtatgtacaggaaaaaatgtagtatatagtatcgtatatatgtacaggaaaaaaacgtactatctgtggtttcaggtgtccactgcgggtcttcaaacgtacccccctcaggtgagaggggactgctgtacaaagaatataggaaggcctctagactacatccattccttcctcaacaggaggaaaattcctggtacagtttaacgtaaggcttcactgatcactgttgtttttgtttttgtttttgtttttttgagacagagtctcactcttgcccaggctggagtgcagtggcacggtcttggctcactgcaacctccacctcccaggttccagcaattctcctgcctcagcctccccagtagctgggattacagacatgcaccaccacacctggctaatttttgtatttttagtagagacagttttcaccatgttgtccaggctggtctcaactcctgacctcaggtgatccacccaccttgccctcccaaagtgctaggattacaggcgtgagccactgcacctagcccactgatcactcttctgcttacagaatatcagaagtcattctagaggcaaatttgaagagtggaaaaatcactttttctgaatgatcttgtttttggtgtagatgtttttattgtgtgggttagtttaatgaatacataaagactaccagtaccattctgtctttactccgtggcatctgtggaataaccctgctaatgtaacacgtgagaaagcctttggtcatgccacccactctaccagttgtccccaccatcccccgccctcctccctgtgagacactgggccaaaggctcactacccctgtgcgttgtccagcacacagacactatgtgcattatttgtacataaggataatcacatctacctgagactgctatcatggaaattaaatgtttggtacatgtaaagtctttgaaagtgtaactggaatattgtgtaattttaataaataataactattgttgtttttatgatcattactaccatttgtgttgccattagtgaatttttacaagaaaactccctgtgggtgcaatgagtctggaaaagaccattgagtcttctagaagaaaacattaagagattattggcacagccgtgggttacgcaatgatttcttagtacacaaaacacagcaaacataaaaagttgttacacttcatcaaaagtacaaagttctgttcatcaaatgatgctgttaagatagggaaaagacaagaaacaggactggaagaagatgtttgctctaaggtacacctgacaaaggaactctcatagaaaatataaagaatccctcaagttgaaaaaaaaatcaatttaaaggggagaaaacttcagcacgtctcaacagaagaccaccaaatggccaataagtaagtgaaaatgtattcaatgtcattgctcctcaaggaactgtagagtaaaaccacaatgtgctgtcactctagacagtcaccaggatgattaaatttaaatcacaataacaaggctgatttcagatgtctcaccacaaagaaggaggataagggagcgaggtgatggatatgttaattagcttgatttaatccttccacattgtatacatgtatcagaacatcacattgtactccatcaatataatacaattattatttgtcaatcaaatattaataaaatcaaagatgagcaggaaaaaaaaaaaaaaaaaaaa

SEQ ID NO: 1350 - DNA, 1161 bp, Homo sapiens
gagctttggggccatttggatcacacgatgttttttcaagattttagaccctttctaagtagcagtccactggaccaagataatagagccaatgaaaggggtcaccagactcacactgacttctggggagcaagacctccacggttgccattgggtcggagatacagatctcgaggaagttctcgtcctgacagatctccagctattgaaggaatactacaacacatctttgcaggattctttgcaaattctgccattcctggatctccacaccctttttcctggagcgggatgctgcactccaaccctggggactatgcctggggtcagacagggcttgatgccattgtaacccagcttttaggacaactggaaaacacaggccctcccccagctgacaaggaaaagatcacatctcttccaacagtgacagtaactcaggaacaagttgatatgggtttagagtgtccagtatgcaaagaagattacacagttgaagaggaagtccggcagttaccttgcaatcacttctttcacagcagttgtattgtgccgtggctagaactgcatgacacatgtcctgtatgtaggaagagcttaaatggtgaggactctactcggcaaagccagagcactgaggcctctgcaagcaacagatttagcaatgacagtcagctaaatgaccgatggactttctgaagctaaagaccacacctgaatcagggctgtggtaatcatcttaccatagctgtaaattgtatcaaaacaaaaaattagtagatggatttaggaatatgtaagaaactcaacacataatataaatgcaatgaatgtttttcttctttaaatttaaagttagtatctacagatggaattgtatctacaaccaaatgcctcttatccctgaattcagagtgataattttataagtgtgaaacttaattatgtagggctccccccgtctgaatagaattaattccttaaagtctagttagggtcctgctgtctgtcatgttgccttgtaacggatgtttccacctccttctccaacctctaccccaccattagtgtattttactataaaaacagtggaaccacagccctaaagtcctgctgatataaagtccttttgtcttaattgtatttaaaaaaaaaaaaaaa

SEQ ID NO: 1351 - DNA, 2770 bp, Homo sapiens
attgttcctgttctctttcttaagtcattcgaaacactgtccctgcgagttctttaagttccctgcaatctgtacacaagagaaagagggagagagagagggagagagacagagagagcagggatcaggtaaaggagtggggctgctgcagccattcagacctcaggagctggaaaattgccaaggatgcagaaggaaatgaagatgatcaaagacgaggatgtgcatttcgacttggctgtgaagaagaccccctcctttccccactgcctgcagccagtggcttctcggggaaaggctccccaaagacaccccttcccggaagctctccgagggccattttcccagtttcggtatgaacctcccccaggagacctagatgggttccccggggtcttcgaaggagcagggtctaggaaacggaagagcatgcccacaaagatgccctataaccaccctgcagaagaagtcaccctcgccctccactcagaggagaacaaaaaccacggccttcccaacctccctttgctgttcccgcagcccccgcgccccaagtatgactctcagatgatcgacctgtgcaacgtgggcttccaattctaccgcagcctggaacactttgggggcaagcccgtcaagcaggaacccattaagcccagcgccgtgtggccccagccaacgcccactccattcctgcccacgccctacccctactaccccaaagtccacccgggcctcatgttccccttcttcgtgccctcgtcctcgcccttccccttcagccggcacaccttcctgcccaagcagcccccggaacctctgctgccccggaaagccgaaccccaggagagcgaggagaccaagcagaaggtggagagggtggacgtgaacgtgcagatcgatgacagctactacgtggacgtgggcggctcgcagaagcgctggcagtgccccacctgcgagaagtcctacacctccaagtacaacctggtcacccacatcctgggccacagtgggatcaagccgcacgcgtgcacgcactgcgggaagctcttcaagcagctcagccacctgcatacccacatgctgacccaccagggcacgcggccccacaagtgccaggtgtgccacaaggccttcacccagaccagccacctgaagcgccacatgatgcagcacagcgaggtgaagccgcacaactgccgcgtgtgcggccgcggctttgcctaccccagcgagctcaaggcccacgaagccaagcacgccagtgggcgcgagaacatctgtgtggagtgcggcctcgacttccccaccttggcccagctgaagagacacctcaccacgcaccggggccccatccagtacaactgctccgagtgcgacaagaccttccagtacccgagccagttgcagaaccacatgatgaagcacaaggacatccggccctacatctgctcagagtgtggcatggagtttgtgcagccgcaccacctcaagcagcactccctcacccacaagggtgtgaaggagcataagtgtgggatttgtgggcgggagttcaccctgctggccaacatgaagcgacacgtgctgatccacaccaacatccgcgcctaccagtgtcacctctgctacaagagcttcgtgcagaagcagaccctcaaggcacacatgatcgtccactctgacgtgaagcctttcaaatgcaagctttgtgggaaggaattcaaccggatgcacaacctgatgggccacatgcacctgcactcagacagcaaacccttcaagtgcctctattgcccaagcaaattcaccctgaaggggaacctgacacgccacatgaaagtcaagcatggagtcatggagcggggccttcattcccaaggtctgggaagggggagaatcgccctggcacagacagccggtgtcctgaggagtctggagcaggaggagccctttgacctctctcagaagcgccgggccaaggtgccggtgttccagtcagacggggagagtgcccagggcagccactgccacgaggaggaagaggaggataactgctacgaggtggagccctacagccctggcctggccccccagagccagcagctctgcacacccgaggatctgtccaccaagtcggagcacgcccccgaggtgctggaggaagcctgcaaggaggagaaggaggatgcatccaagggagaatgggagaagaggagcaagggtgaccttggggcagagggcggccaggagagagactgtgccggcagagatgagtgtctcagtctcagggcttttcagagtacccggcggggcccctctttttctgattacttatacttcaagcacagagatgagagtttgaaagaattactggagaggaaaatggaaaaacaagcagtgcttttaggtatctaagtggacagttttaaaattacatttggaaaatgagaacgaggcagttcaaatatagctttctgtatgaactgtcattttctggagactggcgaatagtaccaatctctacaaatggcttagactaaatgagcagggatgtaggtaatggaaagccttctcaggtcattcacggggcccttgatacccttcacacatgtgcagggtcttcatcagtggcgttttatgcattgccagtataataaactgtgagtattcttccagatatctaattgtaagctgatgctgaggtgcttttagaaattctactttcctttgattcatatgcaatacatggtaaatttctaattgc

SEQ ID NO: 1352 - DNA, 1007 bp, Homo sapiens
gaattcatacaggggagagaccttatggatgtcatgaatgtgggaaatccttcagtgaaaagtcaacccttactcaacatcaaagaacgcacacaggggagaaaccatatgaatgtcatgaatgtgggaaaaccttctcatttaagtcagtccttactgtgcatcagaaaacacacacaggggagaagccctatgaatgctatgcatgtgggaaagcctttctcagaaaatcagacctcattaaacatcaaagaatacacacaggtgaaaaaccttatgaatgtaatgaatgtgggaagtcattctctgagaagtcaacccttactaaacatctaagaactcacacaggtgagaaaccttatgaatgtattcagtgtggaaaatttttctgctactactccggtttcacagaacatctgagaagacacacaggggagaaaccttttggatgtaatgaatgtgggaaaaccttccgtcagaagtcagccctaattgttcaccagagaactcatataagacagaaaccctatggatgtaatcaatgtggaaaatcattctgtgtgaagtcaaaactcattgcacatcatagaacacacacaggggagaaaccctatgaatgtaatgtttgtggaaaatcattctatgttaagtcaaaactaactgtacatcagagaatacacttggggagaaaccctataaatgtagtaaacgagggaaattactctgggtgaagtcagaactttgtagaacacagaacataaagggtgagagaaatctgttaatataatgataatgagaacacctttgccctgaagtcagttctcacagtatagaagagaacttaaagagggaaaaaacaatatgaagatagggaatgcaggaaaacattattctggaatttggaccatacactatgttacaaaactaaaagtggaaaaaacttattggtgaatgaatataggaaacattttgcccaatgccactcttcattaaacatcagagaattc

SEQ ID NO: 1353 - DNA, 6505 bp, Homo sapiens
gcgggagccgcttcgggccttctgggcatgtctgccatatggctccaggtttgtttttctccccggcactctgacggggagggctcccggcatctcctggcgtccgggtaaaggacccggaggatgctgagctgctggcgcactgcagcacaactagagatgtacggatgcccccatcttgatcttacagaatcagaggtacagccgcgagaaagagtcaagaacagacagagtcgcttgaggactcaggagggtgtttgctgcgttgacaacagactacaccctcacagtttgctctgctcttccaacaccagtggaagatgatcacatcccagggatcagtgtcgtttagggatgtgactgtgggcttcactcaagaggagtggcagcatctggaccctgctcagaggaccctgtacagggatgtgatgctggagaactacagccaccttgtctcagtagggtattgcattcctaaaccagaagtgattctcaagttggagaaaggcgaggagccatggatattagaggaaaaatttccaagccagagtcatctggaattaattaataccagtagaaactattcaataatgaagttcaatgagtttaacaaaggtggaaaatgtttctgtgatgaaaagcatgaaataattcattctgaagaggaaccttctgaatataataaaaatgggaacagcttctggctgaatgaagacctcatttggcatcagaaaattaaaaattgggaacaatcttttgaatacaatgaatgtgggaaagctttccctgagaattcactcttccttgtacataagagaggttacacaggacagaaaacctgcaaatatactgaacatgggaaaacctgtgatatgtcatttttcatcactcatcagcaaacacatccaagagaaaaccactatggtaatgaatgtggagaaaatatctttgaggaatccattctccttgaacatcagagtgtttacccattcagccagaagttaaatctcactccaattcagagaacccactcaattaacaatattattgaatataatgagtgtggaacatttttcagtgaaaaattagtccttcatttacaacagagaacacatacaggagaaaaaccttatgaatgtcatgaatgtggaaaaaccttcacccagaagtcagcccacacaagacatcagagaacacacacagggggaaaaccctatgaatgtcatgaatgtgggaagaccttctataagaattcagacctcattaaacatcaaagaattcatacaggggagagaccttatggatgtcatgaatgtgggaaatccttcagtgaaaagtcaacccttactcaacatcaaagaacgcacacaggggagaaaccatatgaatgtcatgaatgtgggaaaaccttctcatttaagtcagtccttactgtgcatcagaaaacacacacaggggagaagccctatgaatgctatgcatgtgggaaagcctttctcagaaaatcagacctcattaaacatcaaagaatacacacaggtgaaaaaccttatgaatgtaatgaatgtgggaagtcattctctgagaagtcaacccttactaaacatctaagaactcacacaggtgagaaaccttatgaatgtattcagtgtggaaaatttttctgctactactccggtttcacagaacatctgagaagacacacaggggagaaaccttttggatgtaatgaatgtgggaaaaccttccgtcagaagtcggccctaattgttcaccagagaactcatataagacagaaaccctatggatgtaatcaatgtggaaaatcattctgtgtgaagtcaaaactcattgcacatcatagaacacacacaggggagaaaccctatgaatgtaatgtttgtggaaaatcattctatgttaagtcaaaactaactgtacatcagagaatacacttggggagaaaccctataaatgtagtaaacgagggaaattactctgggtgaagtcagaactttgtagaacacagaacataaagggtgagagaaatctgttaatataatgataatgagaacacctttgccctgaagtcagttctcacagtatagaagagaacttaaagagggaaaaaaaaacaatatgaagatagggaatgcaggaaaacattattctggaatttggaccatacactatgttacaaaactaaaagtggaaaaaacttattggtgaatgaatataggaaacattttgcccaatgccactcttcattaaacatcagagaattcacacggggtgaaacctgggtcagcatccctaggttgagaagggatgcatttttctgctactactacagtttcacagaatacctgagaagacacacttggagaaaccttttgggtgtaatgaatgtgggaaaacctttcatcagaagtcagctctaattgttcaccacagaactcatataagacagaaaccctatgggtgtaatgaatgtggaaaatcattctgtgtgaagtcaagaggccagagaaaatgcacaaactgtaggaaactataggaaagcatttactatgaggttatattttatggagtatatgtaataagaagtagcttctcagtgaacatcagatagtagagaaagtatttttaactgtatccaatgtgtggatgttttaagttaaaatctaaatttaatatagaacagaggtgttgagttgcaggatatctagcaatttaagaaaatgtggaaaaaatatttttattgagaaatagcattttactttgttaatatctagtttagttcattgtcaagactgctattttctaagagacttctaaagacgccactcaagccaatggctataagtagttcaaaggtttattgcttagccatatgaaaaataagggaagattttttagcaaggggacccacaaacaagagtgctcttgtatgtccagaagaaagagaaagaccatcaatcaggggccatagtacaggagcccaccagcaggatttttgaataatcctagggcagactaaattcagacgacccatctcagaatggtggatcaaagcagcaagtcaatttgccttgtatgcaacttatgaggattagtagaagagagtgggtccagatttctggtggtttctgccctgcagatgtctaacacataagccaggacattctgctgtgagtgacttattgtacccaactctatttctctccatactgaaacatgtctttcataggtgatacaactttttaaaatgtatgtgtagatataacttaaatatggagctttcaaaaagcacaaataggctggacatggtggctcatgcctgtaatcccagtactttgggaggctgaggtgggcaaatcacctgaggtcaggagttccagaccagcctggccaacatgatgaaaccctgtctctactaaaaatacaaaaattagccgggcatggtggtgcacatcggtagtcctggctactagagaggttgaggtgggaggatcacttgaacctgggaggtgggggtttcagtgagctgagatcatgccactgcactccagcctgagtgacagagagagattcaaaaaacaaaaaaaagcaaaaatatactttgctattgggtaaggtatagtagttggcagcagaatggacccattgaggataactataaaattacagaaaatatttaaatgcaacttattgctatagaagcaaagaggactaaagggcaaaattctagagagtggtaaatctcagaaagcacaagcataaaatgcagctctgggggccctttccacttctggctatagggaagaacctgaatactgaacttgattcaggcagaggaccataacctgggggtcaggggaaggcatgggggggaccagaaaccagaagaacaatcaagactgcaatgaaaaaaatggatacattaggagcttcaaacacatataatttctcaagaaatttccagatgtctcatgctgcatagggcaggagcctgaaaagctaatttgagaagataataagtaggatttttgttttgttttgcattttgcagtacaaaggagaaatgattagaacttaggaagtgccagtgggttggtgaacatgccatcagtaaaagccctggaaacaaggtcatactagagattggttgtgccttgtcacaactgcaaacaatacctgagtggagtattcaaaaacttgcttagaaagaaaactctaggaacagatggcttcactgaagttattccaaatatttaagaaataataccaggcttttataaacttttctagaagaaaaaagatggaacttttccaattcagtttttgagggcagtacaaccttgataacaaaacctaaaaaaaaaacaacaaaaaaacccataaagctatagaccaaagtctcatagatttagatgcaaaatcctaaaattgaaaaaaacatctagccatatccataaactatatcatcaccaagagatgtttattagggcaatcaaaagatttattattttaaaaaaatcagtgtggacttccattcctctttcttttgattcccccctttgacttttcatgtatctctcctgccttccttccccagagtggaggagttagacttgcctcgtgggatgagaggagttgtggctttgtgtctgctggcaccaagagggctgagggtgaggtgtggaagggacagggggaggagatgggcagcattgttgagagattggtaacactgagcaaataaatatgttgagaatgatgacagcaagatttctccattagagaaggtatttataaaaataggaatgaggagagctagaaaacctggagtgtggcattagaatagaactcatatcttttaaatatataggaacaaataaataaattgttgtgtgtgcacatatgcatatattttgtgttcattctactgagaggacctaaacacaatgacacctcagtaacagtaagcacaccaactgccaagttattagttcctaaatactatccacaaaaaaggggaacagggatgattcctagtcagagattgggagaaatacaagatgagcctgaatcatctcatgtacctgacagtaagaaaatactctggctggtctcagtggctcatgtctgtaattctagcatgttagaaggtcaaggtgggtgggttgcttgagctcaggagtttgagaccagcctgggcaacatggcacaattgtctctacaaaaaatacaaaaattagccaggcatggtggcatgcacctgtagtccgaggtactcaggaggcagagacgtgggaggatcgcttgagcctgggagattgaggctgcactgagctgtgatcgtgccactgtactctagcctggaagacagagtgagaccccatctcaggaaaaaagaaaaaaaaaaagatgtcattcagcaggttaatggataaactgtggaacatccagaaaactttaacattcttcaaagaaatagaaaacacaatcctaaaatttatatgggaaccacaaaagacttagaatagtcagctatcctgagcaaaaggaatcaaactggaggaatcatattacctgacttccaattattcaacagagctacagtaaccaaaacagcatgatactggcataacaacagacacataggaacagtatagacaacccagaaacaaattcatacatctatggtgaccacttttgacaaaggaatgaagaacatacactggggaaaagataatgtctttaataaatggtgctgggaaaactggatatccatatgcagaagaatgaaactagacccccatctcttagcatatacaaaaatcaaaattaattaaaaagttaaatctaagacctcaaactatgaaacagctaaaagaaaacatcggggaatctctccaggacattggagtgggcaaagatttcttgtgtaatacctgacaaacaggcaaccaaagcaaaagtggacaaatgggatcacatcaagttaaaaatcttctgcattgcaaaggaaataacaaagtgaagagacaacccatagaatgtgagataatatttgcaaactatccatctgtattaggccatttttgaagtactacaaagaaatacttgagactgagtaatttataaagaagaggtttaattggctcacggttttgcaggctgtacaggaagcatggtgctaacatctgatcagcttgtagggaggcatcaggaagtttccaaccatggtggaaggcaaaaggggaataagtatctcacatggcaggtgcagggcaaagagaggggggaagggaagtgccacacaaccagatcttgtgagtactcagattttgtgaggggtgcttgaggtcatggatacccatttaccctgatgtgtttatacacatttcatacctgtattaaaatatctcatgtaccccataaacatatacacctactttgtacccacaaaaatttaaaaataaagttaatttcaatgttt

SEQ ID NO: 1354 - DNA, 2837 bp, Homo sapiens
aaacgagggggaacttccgttctttgttctgtccccggtgtgtgggtctgtgacagggtccaacagggcctggtccgtgtccggtcccccaaatctgtcgtccctgcccccaggcattggcatcaacaaaagtcagaattcccgggaacttgaacagaggctgctaaattcccagtaattgctcctttggccttctagggactgacttcaaagaaggaaggaaagaatcagtgcttcctcattctcttttaaaacccgcttcccgctgagtctgcacccaggagaccagagagcaccttgcccttccatggaaactcaggctgatctcgtatctcaggaacctcaggccctgcttgacagtgctcttccttcaaaagttcctgccttttccgacaaggacagcctgggggatgagatgttggcggctgcgctcctaaaggccaagtcccaggagctggtaacctttgaggatgtagctgtgtacttcatccggaaggagtggaagcgtttggaacctgctcagagggacctctatagagatgtgatgctggagaattacgggaatgtgttctcactggatcgtgagaccaggactgaaaatgatcaagaaatttctgaagacacaagatcacatggggtcctactgggaagatttcaaaaggatatttctcagggtctcaagtttaaagaagcctatgaacgagaagtcagtctgaaaaggccgctggggaactcccctggagaaagactgaacaggaaaatgccagattttggtcaagtgacagttgaggagaagctaacccccaggggagagagaagcgagaaatataatgattttgggaacagcttcactgtgaattccaaccttatctcacatcagagactccccgtgggagacagaccccataagtgtgatgaatgtagcaagagctttaatcgaacttcagaccttattcaacatcagagaatccacactggggaaaagccctatgaatgtaatgagtgtgggaaggccttcagccagagctcacaccttattcagcatcagagaatccacactggggaaaaaccttatgaatgtagtgattgtgggaaaaccttcagctgtagctctgccctcattctgcatcggaggatccacacgggggagaaaccctatgaatgtaatgagtgtgggaagaccttcagctggagctccaccctcacccaccatcagagaatccacactggtgagaaaccctacgcctgcaatgaatgtgggaaggccttcagcaggagctcaacccttattcaccatcagagaatccacactggagaaaaaccctatgaatgtaatgaatgtgggaaagccttcagccagagctcacacctctatcagcaccagagaatccacactggagagaagccctacgaatgtatggaatgtggaggaaagtttacctacagttcaggccttattcagcatcaaagaatccacaccggggagaacccctatgaatgtagtgagtgtgggaaagccttcaggtacagctcggctcttgttcgccatcagagaattcacactggagagaagcctttgaatgggatcggcatgagcaaaagctccctcagagttacgaccgagttaaatatcagagagtccacgtgaaagagccacacacccattttcctcactttccctgagtctcaagagctcttgccttaccctataaatctcaacagcttaggatgtgtccctttcaactcagacttttcattttagagaatggggcagatggggcaaatcgttgaattttcccagaaatcacaccagccttagaaagcgtcaaggcaagtggatggcgtgctgggaatagaaagcagctctgggaccagttaccccatttaggaaaggagtttgcactaaactgtttttctcacagcagaggaacctttccaaggtggggatggaagcacagtcgggacagaattcgatggattcctttagttggagtccgcgtagtcagcacagacagcagtggaaaggacgctctgggtcctgttatttgctagggagggtaaagggagactatttcaaagctactgttcctagtccagctttaagtttcggtaagaaacatgctgttttgtttcatgatttcgttaattatggaaatttggcattgagggattattttattgagggtagaagagattccagaatcatcatctgtgatgatggtgtcctttagggctcttggagcagccagaccatgtttccaagagaaacctggtgatattgccagcagaccccctgccatcccccccagttgtcctggggctgaatgggcaaatctgtccaaacagctagtaaccggctgtgagggagagggtcagaagcacttagcgttggcctctgattgctgtcctctcttgtcctcttcccactccaatgatgaaaatgattttctctaaatgcctgggtaaggatgctttcaaggagctcacttggcctgcttgccctgccctctcacctctgacacccagccccaggagccagaccactcctgcctccacctctgactcttcagcagctgaagattaatgcagagaaagagcaaagcccaaaagggagaaaaaaaaaacaaaaaaacaaaaaaacgaagcccagagaaggcaggctgtgcctgagcctggtagcagagctcgttgctgggtgaggatggcactccccgagttttcccaaccgacgggatgaccttccattgtgttttcccaaccctgctcatcctgtagcataaatgaagtgcactattaaacagaatagtttttcagaagagaaaaaaaaaaaaaaaaaa

SEQ ID NO: 1355 - DNA, 2830 bp, Homo sapiens
gactcaccctgggccgggggtgaggcttggactgtttctttttccaaaagaggagctcaaaagagaaagttcatctagaaatctcaaagccatgtctcaggatgaactagagtatgcccttacagggatcagtgtcattcaaggatgtgactgtggacttcacccaggaggagtggcagcaactagaccctgctcagaaggcgctttacagggatgtgatgttggaaaactattgccacttcgtatctgtggggtttcacatggctaagcctgatatgatccgcaagttggaacaaggagaagagctatggacacagagaatttttccaagttacagctacctagaagaagatgggaaaactgaagatgtcttagtgaagttcaaagaataccaagacaggcattctagacccctcatattcatcaaccacaaaaaactaattaaggagagaagtaatatttatggtaaaacatttactctaggcaagaaccgtatttcaaaaacaatactatgtgaatataaacctgatggaaaagttttgaaaaatatttcagaactagtcattagaaatataagccccataaaagagaagtttggtgacagtactggatgggagaaatcactcctcaataccaagcatgagaaaattcatcctgcagtgaatctccataaacaaacagaaagagttctcagtggtaaacaggagcttattcagcatcagaaggttcaagctccagagcaaccatttgaccataatgaatgtgaaaaatccttcctgatgaaaggaatgctatttacacatactagagctcacagaggagaaagaacctttgaatacaataaagatggaattgccttcatagaaaagtcaagcctcagtgtccatccaagtaatcttatggaaaagaagccctctgcctacaacaaatatgggaaattcctctgcagaaagcctgtttttattatgcctcagagacctcaaacagaagagaaaccctttcactgtccttactgtgggaataactttagaaggaagtcatacctcattgaacatcagcgaattcacacaggtgaaaaaccttatgtttgcaatcaatgtggaaaggccttccgtcagaagacagccctcacccttcatgagaaaacacatatagaggggaaaccctttatttgtatcgattgtgggaagtccttccgccagaaggccaccctcactagacatcacaaaacacatacgggggagaaagcctatgaatgtcctcagtgtggaagtgcctttaggaagaagtcatacctcattgatcaccagagaactcacacaggagagaaaccgtatcagtgtaatgagtgtgggaaggcatttatccagaagacaaccctcactgttcatcagagaactcacacaggagagaaaccctatatttgcaatgaatgtgggaagtccttctgccaaaagacaaccctcactctccaccagagaattcacacgggggaaaaaccctatatttgtaatgaatgtgggaagtccttccgccagaaggcaatcctcactgttcatcacagaatacatacaggagaaaaatccaatgggtgtcctcagtgtgggaaagccttcagtaggaaatcaaacctcattcgccatcagaaaactcacacaggcgagaaaccatatgaatgtaaacagtgtgggaagttcttcagttgtaagtcaaacctcattgtccatcagaaaactcacaaggtagaaaccacgggaattcagtaagtaatgtggctttttttgtaaaaaaatgttaagtcatagtaaaccctgtagatgatgttgcttgcaagcgtaatatccaacagtttaaggtactataccacatggtaacctactgtttgccagcctgtaaaacacacacacacacacacacacacacacaaatattattagacaaattagatgacaaaaatcattaagaagtccaaactttttttttattactagcttcagcagacaaaaacttcctctgtcaaggtgttataaacatttaaaatcacattttccatttccatacatatctttttgttcatcagtaataactagttggccaactgactgtggtccatggactacacagtgagtagaggttctttaaaagaaggaggtatgaactgtatttctcattgcaaatacaaaataaaaattagttgttacctcctcacagttgaccatgattctgacttctaacattacaaattagtttttactattataaacctttctataaattggattatatatcatgtattctttcatatacagcttattaccttcatcatgtccgtgagtctaatcattagtacgtgtggcagaagtttatttatttttatccagtatagaattcaattatatgattatatcacaatttatccattctgctgttgatggacttttacattgtttacagcttagggtcataataaatcatgcttctgagaacatacttgtcttggtgtacatacatgtatttctcttgtgtatatacttaggagtggaatcgctgggtcttagagcatgtgtgtattcagtcagatactggcagacaattcagaactttcaccacatgagataattgacactgaagggaaacagctataaattttatcaatatggtgctggttcaaaccagagaattcatgctgcagggaaactcaatcaatgttattgtgaaaactgggaatgtgaatgtaatatatgtagaaaaacatttagccacagcccaaatcttccaggcaaatgtaataaacgtgacattgccgttagccaaaaaaaaaaaaaaaaaa

SEQ ID NO: 1356 - DNA, 3117 bp, Homo sapiens
gcaaggggagggcagcaaggagggggggccacccactacctcgcgcccccgccctgcgggtgtctcgcgcgcgttccgtgcgtgtgagtgtgtgggtctgtctcgctccagaagtgcgtgcccgcgcgctgcgccttgcgctttttcccctccctcgccccttcctggtcctcccaccctcctcggctccctcctttcccagcaaacgccgcccctcccgcgccctggctcaggctctggcgccgccgcagccgtcgccgcccgaaagttcaggagccctggaaaggagaaggaataagacggcaggaggaagagagagagagggtagaatggaagaatctcacttcaattctaacccgtacttctggccttctatccccacagtctcaggtcagatcgagaacacaatgttcatcaacaagatgaaggatcagctgttgccagagaagggctgtggtctggccccacctcactaccccaccttgctgacagtgcctgcctcagtgtccctgccctcaggcatcagtatggacacagagtccaagtcagaccagctgaccccacacagccaagcgtccgttacccagaatatcacggtggtccctgtgccgtctacaggactgatgactgctggagtctcctgttctcagaggtggagaagagaagggagtcaatcaaggggtccgggtttggtaatcacgtccccctcaggctctcttgtgaccacagcatcatcagctcagaccttccccatttcggctcccatgattgtctcagctcttccccctggctcacaagccctgcaggttgtccctgacctctccaagaaggtagcatcgaccctaaccgaggaaggaggcggaggtggtggtggaggtggcagtgtggctcctaagccaccccggggccggaagaagaagcggatgctggaatcagggctgcccgagatgaatgacccttatgtcctctcccctgaggatgatgatgaccatcagaaagacggcaagacctacaggtgccggatgtgctcactgacattctactccaagtcggagatgcagatccactccaagtcacacaccgagaccaagccccacaagtgcccacattgctccaagaccttcgccaacagctcctacctggcccagcacatccgtatacactcaggggctaagccctacagttgtaacttctgtgagaaatccttccgccagctctcccaccttcagcagcacacccgaatccacactggtgatagaccatacaaatgtgcacacccaggctgtgagaaagccttcacacaactctccaatctgcagtcccacagacggcaacacaacaaagataaacccttcaagtgccacaactgtcatcgggcgtacacggatgcagcctcactagaggtgcacctgtctacgcacacagtgaagcatgccaaggtgtacacctgcactatctgcagtcgggcatacacatcagaaacataccttatgaaacatatgcgcaaacacaacccgcctgatcttcagcaacaggtgcaggcagcagcagcagcggcagcagtggcccaggcccaggctcaagctcaagcccaggctcaggctcaggctcaagcccaggcccaggcccaggcctcccaggcatcacagcagcagcagcagcagcagcagcagcagcagcagcagcagcaacagccaccaccacacttccagtctcctggggcagccccccagggtgggggtggtggggacagcaatcccaaccctccaccccagtgttcctttgacctgaccccgtataagacggcggagcatcataaggacatctgcctcactgtcaccaccagcaccatccaggtggagcacctggccagctcttagagatccgtgctgccacccactgggaagaggaagaagtagtcctggtgtcttctttctccaactcttggtgggaaaagtccttttcttccttgacaggccttggctccatctccttgggcctctgtcacggctttccttcacaggataccatcctttttctgaactcttcttcaaaaggaacatcagccctcctgattgcaaaggaatactgagctgatggtgtcatccagcagcctcccctcccaagcaaagcttctaaaactgggggtcggtgctcaagggaaggatttgctatgacctcatagaaccttgtccagtgtggccacttaccctatccttaccctccttatcctcaaagtttgggctgatgtaagactagaggctggccctcccagataacagagaaaagggagccccaaatgcaaccagcctcttgttctattcttgcctgcaaaagaacagaggtttctcaaatgcctcagtccctgagagccatttcttcccctacatcgtctcactttgcttcctattgactgctggtagaaggagatttggggtaggggctagacctccttttatttgaagggggcaagggctgagatgtggtccccaaggggccagaaattcccaagttggtcacaggtggcttagaagtgtgtgttatggttttacggatttccttgaagcctctctccttctctgcctacaaagaccctatactctcagtctccccaacccacccccaaggagctgtgggaggctttgtgttatctgtgaaactccaaaacaggggtgttgcggagaagggagagttcaaggcaaacgcaaggactggacttagctccctaggtgccacagtcagatgccggacacggatttatatataaatatatatatataaatatattatactcactcatcacggccatctttgttgtaaccatttctgtgtttataaatgcattatctctgagaattttcatatttgatgttttgtttatttttgtcctttttttccctctctccacccctgtcctctagccacagcatttttctttttgtcttttttttttttttttaaatcatggcagatttcagaggaaaggaaattaaaaaaaaaatcaggaaaccagttgttataaagtaatttaaaaatgaagaaaaaaagaaaaaaacttatgtacaaaccaaggggtgtttttagaacattgtatagaaataaattcatgtaaaagga

SEQ ID NO: 1357 - DNA, 2259 bp, Homo sapiens
gtaggcgcaaagctgaggaaaggagagtgtggagaggggcctggtgtggtggggcccggtgtttgggaccggagggtgttgacggctgatgagttccttgggtttgctctttcttcacctgaaaagaagactccaggaagggcagcacatgccggagaaagatgaattccagcttgaccgcccagaggcgcggcagtgacgccgagttgggaccctgggtgatggctgcgaggtccaaggacgcggcgccgtcccaacgcgacggacttttgcccgtgaaagtggaggaagactcacccggaagttgggagcccaactatcccgcggcttcgccggaccccgaaacttctcgactgcactttaggcagctgcgttaccaggaggtggctggaccggaagaggcgctgagccggctccgagaactctgtcgtcggtggctgagacccgagctgctctccaaggagcagatcctggagctgctggtgctggagcagttcctcaccatcctgcccgaggagcttcaagcctgggtgcgagagcactgcccagagagcggggaggaggcggtggccgtggtgcgggctctgcagcgagcgctcgatggaacctcatcccaggggatggtgactttcgaggacacggctgtgtctctaacctgggaggagtgggagcgcctggacccagcacggagggacttctgcagagagagtgcgcagaaggattccgggagcacagttccgccgagtttggaaagcagagtggagaacaaagagttgattccaatgcaacaaattttagaagaagcggagccacaggggcaactacaagaagcgttccaggggaagcgccccctgttttctaagtgtggcagtacccatgaggacagggtggaaaagcagtccggagaccccttgcccctgaaacttgaaaattctcctgaagcagaaggactcaacagcatctcagatgtcaataagaatggttccatagaaggggaagactctaaaaataatgaattgcagaacagtgccaggtgttccaaccttgttctatgtcagcacatcccgaaagcagagaggcccactgacagtgaggaacacgggaacaagtgcaagcaaagtttccacatggtgacgtggcacgtgctgaaacctcacaagtctgacagtggagacagtttccatcattccagcctttttgagacccagaggcagctccatgaagaaagaccttataaatgtggtaactgtgggaagagtttcaaacaacgctctgacctctttagacaccagagaatccacacaggtgagaaaccctatggctgccaagaatgtgggaaaagcttcagccagagtgctgccctgaccaagcaccagaggacacacacaggcgagaagccgtacacctgtctgaaatgtggggagcgcttcaggcagaattcacacctaaatcgtcatcaaagtacccacagtagagacaaacattttaaatgtgaggaatgcggggaaacctgtcatatttccaacctttttagacatcagagactacataaaggggaaagaccctataagtgtgaagaatgcgagaagagcttcaaacagcgctctgacctctttaaacaccacagaatccacactggggagaagccctatggatgttccgtctgtgggaaacgcttcaatcagagtgcaaccctcattaaacaccagagaattcacactggggaaaagccttacaaatgtcttgaatgtggggaaagatttagacaaagtacacaccttatccgacaccaaagaattcatcaaaataaagtgctgtcggctgggcgtggtggctcacgcctataatcccagcactttgggaggccaaggcaggcagatcatttgagatcaggagtttgaaaccagcctggccaacatggtaaaatcctgtctctactaaaaatacaaaaatgagccgggcatggtggtgcatgcctgtaagcccagctattcgggaggctgaggtaggagaatcacttgaacccaggaggcggaagttgcagtgagctgagatcatgccactgcactccagcctgggcaacagagcgagactccatctcaaaaaagaaataaagtgctgtcattttgatatgtttctatgtgaaaaaaaaaaaaaaaaaaaaaaaaaaaaaaaaaaaaaaaaaaaaaaaaaaaaaaaaaaaaaaaaaaaaaaaaaaaaaaaaaaaaaaaaaaaaaaaaaaaaaaaaaaaaaaaaaaa

SEQ ID NO: 1358 - DNA, 2788 bp, Homo sapiens
agaaccggaagttgttgcgcagctggcagttccccggtttctccccgacggcgtcgggaggagtgtccatcaggacagcttcacctccttgaggattaaagcctaacagtactgagctatttgtctgtcaaaatgtctgcaaaattgggaaagtcatcatcactcctaacacaaacttcagaggagtgtaatgggattctgacagagaagatggaagaggaagagcagacctgtgatccagactctagcctccactggagcagcagctacagcccagagaccttccgccagcaattcaggcagtttggctaccaggattcacctgggccccatgaggctctgagccggctctgggaactttgtcatctctggctgaggccggaagtgcacaccaaggagcagatcctggagctgctggtgctggagcagttcctggccatcctcccaaaagagcttcaggcctgggtgcagaagcatcatccagagaatggagaggaaactgtgactatgctggaggatgtggagagagagcttgatggaccaaagcagatcttttttggacgaaggaaggacatgattgcagagaagctagcaccttcagaaatcactgaggaattgccaagtagccagctcatgcccgtgaagaagcagctccagggagcatcatgggagcttcagtccttaagaccacatgatgaagacatcaaaactacaaatgtgaaatctgcttcaaggcaaaagacttctttaggcatagaactgcattgcaatgtttccaatatccttcatatgaatggctcccagagttccacatatagaggaacctatgaacaagatggtaggtttgaaaagagacaaggaaacccttcttggaaaaaacaacagaaatgtgatgaatgtggcaaaatctttagtcagagctcagcccttattttacatcagagaatccacagtggaaagaaaccttatgcatgtgacgagtgtgcaaaggcattcagccgaagcgcaattctgattcagcatcgacgaacccatactgattcaaaatatgaacatgcgattgcagaggcccaaaagaatatgtacttcaagactaggctgaagtgccccaggtcactttcaggaggcagataaataaaggccttatcttatgaaagcacacaagagcctccatactattaatatcaagttaatttcccgtgttggaaaaaaataatctcctttgcaatgtaatttggaaataagtcaatggaaacatgaaaatgactgcttgtctacaaggagtcagctaaacataaggaatgttttcataacaatattaatctatgggtgcttctgtaagatggatgatcatcttaatataaagaaaaaagggagatgaacaaaattgtcaaacaagactgatgtaccacaagtgttgtcaagtacagtgtgtgtcggagagatgtaccacagcttaactggaagaggaagcccgtaactgctgatgacaatactttcagtgtccccttttctggcataaatcaactatgaatatgtttcaagcatcacaagacaaccttttcagagtcttctgtattcttagtaagatgagtttctagacacgctgtcatgaaatgagaccctggattttgatgctcttgtacatatggacaaatcactgaagttcaatttaaagggtccactgcagtcccttataaacaattgttgaacctaaccattatagtttataagttttaagacatttatgggatatcttatttggcttatctatgggatatgagtaactatgttttacctgcatttaattcagccagattccctgtttaaaattactgaatcgtacattattaaaattattctgacagtatacaaacaacaaaattatctattttccagagattcttgataaaactctgtaatgttactacaataatacatgtattgtgttttccatggtgctacagttacacaatatggaggcaaacatcagaaatcaaagtccttggaataagggaagagactcatagtaaacttctttgtctggttgggttcctcataaagtataaaacatttcattctcagaaaatccaaccatatcttagagtatctccagaaactggcttagaggagctccaaatatgtggaattaccacactctgcttagttagtatgctgataaatgtaagattagtaggaggagaagtgaatgtaaattttattatagaattttctgatagtgattatgatttgtagctctagtgaatatgaattttatattgagttgtgtgtatcttgagtcactaaaaatgtaggatactttttatttggggctcattgtctttgtaattacggagaggaacaaaccatctattgaaacaacaagtgcctcagagatgtatatattgtgaattactgcttaattacggaaagagtttcttaggttctatgtgaataagatggcagaatctaaatcaagtattttgaaggaagcacccatcttcacttggtgctgccatcaactttgtaagattgcattctatttattgtgaataatttgagtgtttccacaggaaagtggtatgaatcatatcgtctaagtatatgatgaatctttaaagggtgtctctgtgtactttgaattattttgcagttatgtaggtatcctaatgagtgaatggtactagtttatataaaaggagaattcattgagctaaccttggttttaaaaattagcattagcacccccattatattaattttcagggatagtaaatactccaaaatg

SEQ ID NO: 1359 - DNA, 1494 bp, Homo sapiens
ctgcgtacgcgcacttccggtctttgtggcttgcagctcggggtgggtggctcatttcctggccgctcctgggcttcgcggaaagaagagattactcacactccttcgcaagcacagaaccagttgtactgagctttttgctaagctgtttcagccaagaatggctgtggaatctggagtgatttcaaccctgatacctcaggatcctccggaacaagaactaatactagtgaaagtagaagataacttttcctgggatgagaaatttaagcagaatgggagtactcaatcctgccaagaattgtttcgtcagcaattcagaaaattttgctaccaggagacacctgggccccgggaggctctgagccgactccaggaactttgctatcagtggctaatgccagagttgcacacaaaggagcagatcttagaactgctggtactggagcagttcctgagcattctgcctgaggagctgcagatctgggttcagcaacataatccagaaagcggcgaggaagctgtgaccctgttggaggatttagagagggagtttgatgacccagggcagcaggtcccagctagtccacagggaccagcagtgccatggaaggatttaacatgtctcagagcatcccaagagtcaacagacatccacctccagcccttaaagacacagctgaaatcctggaaaccatgcctttcccctaaaagtgattgtgagaacagtgaaacagcaacaaaagagggcatctcagaagaaaaatcacagggactccctcaggaaccttcatttcgaggaattaagttgtccagacctcccaaagcttcttcagctatccgttgggaatgtgtttctccaggaagttttcccggcgatatcatagctgctgaggctacacattcaacaatttcttgctttgccatcaacactttgccagccaccatcctgccatctaaaaatgtgaatagaaagtatttttcctgaagaacacatcgtcaataaatcacctgcacccaaatctccatctcaggcgctacttctggcaaggcatatcatgaggctagtgaagcacctacaagaaacttataactcaaggttgtaaaaatggcatggtgactcttacaatcatatcacagtgggcctctccaacaatttaaacctcatgacctaggtgaaagctgtgaaaggatccacattaattcttcagaggcagggctaagactttcaagactgaaaagagactagcataaggagacttaacaggaacccagtcaaggccattcatggccatgggaccacgcataaatggagaacgagtaaattttgctaagtccaaggacattggagagatagagtcactattactgatatggtgactgagtcaacaacatactgccactatgaagtaataagaaaataaaaagttaaaaaatgtaacagataacagttggagggtgaatatattttaaatcaatcagaaaaaaaaaaaa

SEQ ID NO: 1360 - DNA, 5508 bp, Homo sapiens
tcggtcctcagaggaggggcccgggcaccctccgtgcgggccgcagcacgccggtctttgagggacccttggactcccggatctgcatgcgagggatgcggtcgaagacgagatgagggagctgacgggaggggaaacggaggggcaggtgaacatggagagagcaggaacagggagagagtagggacagcgactgggagacgcgctccacagaaacccggactgagaggcagcgagaggacgtagtcttgctctgttgcctaggctggagtagagtggtgtgatcttggctcactgcaacctccgcctcccaggttcaagcgattctcctgcctcagcctcccaagtagttgggattacagacatctgaatgggactccgagtgccttacatccctgcagccccttcctcttcctacacccccagcagcaaatgaggcacacctgcagacagcagctatctctctgtggacagtggtggccgccgtgcaggctatagagaggaaggtggagatccacagccggcgactcctacacctggaaggtcggacagggacagcagagaagaaactagccagctgtgaaaagacagttaccgagcttgggaaccagctggagggcaagtgggccgtgctgggaaccctgctgcaggagtacgggctgctgcagaggcggctggagaacttggagaacctgctgcgcaacaggaacttctggatcctgcggctccctccaggtattaagggagatatcccaaaggtgcctgtggcatttgatgatgtctccatctacttttccactccagagtgggaaaaattagaagaatggcaaaaggaactttacaagaatatcatgaagggcaactacgagtctctcatctccatggattatgctataaatcaacctgatgtcttatctcagattcaaccagaaggggaacataatacagaggaccaggcagggccagaggaaagtgagattcccacagaccccagtgaagagcctggtatttcaacatcagatattctgtcttggattaaacaagaagaagagcctcaggttggggccccaccggagtccaaggagagtgacgtgtacaaaagcacttatgctgatgaagagcttgtcatcaaagctgaaggccttgctagatcctcgttgtgccctgaggttccagtccctttctcttctccaccagcagcagcaaaggatgctttttcagatgtggctttcaaaagccagcagtctacatccatgacaccttttggacgtccagccactgacctgcctgaagcctctgagggacaagtgacttttactcagttgggtagctatcccctcccacctccagttggcgagcaggtgttctcatgccaccactgtggcaagaatctcagccaagacatgttgctgacccaccaatgtagccatgctactgagcaccccttaccctgtgcccagtgccctaagcactttactccacaggcggacctcagcagcacctcccaggaccatgccagcgagacaccccccacctgcccacactgtgccaggacttttactcacccatcaagacttacctaccatcttcgggtccataacagcactgagcgtcctttcccctgtcctgattgccccaagcgctttgctgaccaggctcgactcaccagccaccggagagctcatgcaagcgaaaggcccttccgctgtgcccagtgcggcaggagcttcagcttgaaaatcagcctcctgctccaccagcggggtcatgcacaagagcgccctttctcctgccctcagtgtggcattgacttcaacggccactcggccctgatccgccaccagatgatccacacaggcgagcgtccttacccctgcactgactgcagtaagagcttcatgcgcaaggagcacctgctgaaccaccggcggctgcacacaggcgagcggcccttcagttgtcctcactgtggcaagagcttcatccgcaagcaccacctaatgaaacaccagcgcatccacaccggggagcggccctacccctgctcctactgtggcaggagcttccgctacaaacagacactcaaggaccacctccgttcaggccacaatggaggctgtgggggtgatagtgacccatcaggtcagccacccaacccaccaggtcccctcataactgggcttgaaacttctggcctgggtgtcaacactgaaggtctagagaccaaccagtggtatggggaagggagtggagggggagttttgtaaatccaaatctctgtggcttcatgcttgtatatgctcacagcagggcacaaaatccaagagaaggtctgtgagccccatccaacacccacagtaattattatctggcacatcaatgaatttggggtcctatacacttgactagagacatgcttgtgttttggaatttcacacccttacaagaataccacattttgaaacccagaaagacctggaaaggagcccagcatgtccatcttttcaaagatacaacaaaagcagaagttacaagaatattgcggagaggttggaaagcaggatttaacctctagttctcttgttctcagagaacagcaggttgatagtagattatgtctctaggtagagacagatacatgagaagagcctccaaaactggaagcccatcataaggcatgagaatgtttaactataaagccttttattagttctttgatagctaagatggttgttggagaaagtgcttaagccactgtttatgttgctgcctcctctctcaaaaccagccaagatctgttcacacacctctgtggctgtctttccctgaaacatggtaactcaagactgcctgcctaggtttcttagattaattattcacataaattttgtttaatattggttgaacaagaaatctgactttaaaagattattaaggagaatattccttaactatactggcttgatttgaaacaggctcttattgccatttaaactgccagaaatctttgccaaggtcctggttaaaaaaattggaaacggttttcttagccccagctttaaaagctagagatctcagagaaatagctggcttaacaatgacagaacagcttaaaatttgtgcctacaccatgttctgagagtcgttcacatcaaattcttatcttttccaagccagtaagttggcttctccattcctggtgtctgatattcttgacaatcatcagcaacaaagatcacagcactttccagaagcatggagcttcagaaagtgccagtgaactcttggtcctcagtagtgagatgataacagtgttataatgcagcttccttgagccatcagagagagtgtatgttcaccctatctggctgtatcccattggcagtggacagattgaggaaattcctagatcactgagagctaagcaccatgcatagacaacagtttgttcttgcctgtgttgcttttagggactttgactaccacatgttcttttcttggggtgatttaatcacctgggagcatctgagtctgctcctaagtggctttgcaactgggcctaagttctgtttcctttatggatctcaaattttcatctgcacaatgaggctgttgaaaggaaaaaaagtgagcctctaggaattattcaaaaaaagtctgtgatacattccttttcctgccaaagttctgtctctgtctttggcttctgtccaggcaaagctaaataagacagcaaagtcaaagcagataaattcttgttgaaacttgactaaaatttatttgatttgttgttttactcccacttggaatcctgaggtagaagacagaatgcagaagtcttacatcttgggcaggaaactggtttattcctatactcttgtttcctctgcttcttcctgaggtctagaacaaggtctggaaatgtttagacaggatattttcttgatgaagtgataaggaaaggacccatttttttgctcatcacctagcccatccttcactctctctagttatgcataacaacactagaagaaggtgttagcccagctaactttgcttctgggaaggctatgtctgaacatgttgctctgtaggataatcacacttagaaaacatctgctccatgacattcacaataccagggaccatgggagacacaagaaatgtgtgtctgctgtcataacttacagtgaaaaagcccaataatacagaacaagacatgatgggcaataccctagcatattgggattaagagctttctagccagaatctggacctataccatgggaaaatttaggggtgctgggaatcccaaagccaaggttctggcttcattggcaacccactaggaacttgaatgtgagattcagctctagtttgcaccttgatttccccagtgaaaagggagaagagccaaagtattgtctaggtgctgagttcccttttctgagtggatttcaagcatttgccagggtatgctggaggagggactcctaaagtaggtgagatgtgggactaggtaacactttaaatacttttttactcaaagatttgccaagaacacagcttattagtgaaagagacctgtggattgaaatggctgcagatagatcccgcagtcccttctgaaaggaactgtgtagccagcagggacctaaactttggcaaaaagtgaacacaattcaaatacgaatgaaggaagagccctcagatggaacgaaaggcgatgtgcaaggccatcccagagagacggaagcaggtgcgatactaagcctcagcccaagaataaaagagagttcaactgttactcttttctttcatcaatcccctatcagttagaactgcaggccagttccaaagagtgtttgcttaagattcaaaagtgggtaagtaaaatggatcagtgggaaggataaggtgtccaacagaaagtgtggaggagaaactcttggcctatcaagtgctcctgagagaaaccatgcaatttaacacttcagttaaagaaatacatgagaactgcttgtcatgaccagacaagataggaaaggggaaaccccagaaacgtgctcttcatctgtcagccttttggaccaagaagctgtcactatcacacataagcaccattcccttagagtggatccaggtgttgactataaccagatttactctttgcttactaggttttccattgtcaccattggatgaacctctggtttagccacagttgtgaaaataaatggaagttggttgattgtctagaaagtgcaagaagatggccctgctccttttctgctgaacatttagtattggaaactcctacttcccttttcattaataatgtgtgcaagtttcctattagcggggaaggtgtggggctctgctgggcttctcttgagcatatctgagaagtgatgttcatgtctatctcaaccaggaccagaccctgtgacttactcggtaataacagtccacacaagcctcgttgatattaaaaaaaaaaaaaaaaaa

SEQ ID NO: 1361 - DNA, 4006 bp, Homo sapiens
gctgaatttgggtgaggaggaaggagaagcaggtaacgagtctgaccttgaactagaaaagaagtgtaaggaagatgatcgggaaaaagcctcgaaaagaccacggtcacagaaaacagagaaagtccagaagatctcaggaaaggaggccagacagctttctggggcgaagaaacccatcataagtgtggttttaactgcacacgaagcaattccaggtgctaccaagattgtgccagtggaggctgggccccctgaaacaggagctacaaattctgagaccacttcagcagacctggtgcctcggagaggctaccaggaatacgccattcagcagacaccttatgagcaaccaatgaagtcaagcaggctaggtcccactcagctcaaaatcttcacttgtgaatactgcaacaaggtcttcaagttcaagcactcgctgcaggcccacctgaggatccacaccaatgaaaagccatacaagtgcccccagtgcagctatgccagtgccatcaaggccaacctcaatgtgcacctgcgcaagcacactggagagaagttcgcctgcgactattgctcgttcacctgcctgagcaagggccacctcaaggtgcacatcgagcgagtgcacaagaagatcaagcagcactgccgcttctgcaagaagaagtactctgacgtcaagaacctcatcaagcacatccgagacgcgcatgacccacaggacaagaaggtcaaagaggccttggacgagctctgcctgatgacgagggagggcaagcggcagctgctctatgactgccacatctgtgagcgcaagttcaagaacgagctggaccgtgaccgccatatgctggtccacggagacaagtggccttttgcctgtgagctctgtggccatggggccaccaagtaccaggcgctggaactgcatgtcaggaagcaccccttcgtgtacgtctgtgccgtctgccgcaagaagttcgtcagctccatcaggctgcgcacccacatcaaagaggtgcacggggctgcccaggaggccttggtcttcaccagttccatcaaccagagcttctgcctcctggaacctggtggggacatccagcaagaagctctgggggaccagctacagctggtggaagaggagtttgccctccagggcgtgaatgcactcaaggaagaggcctgtcctggggacactcagctggaggagggccggaaggagccggaggcccctggggaaatgcctgccccagctgtgcacctggcctccccgcaggccgaaagcacagccctgccaccctgtgagctggaaaccaccgtggtctcctcctcagacctgcattctcaagaggtggtttcagatgattttttgttgaaaaatgatacctcctccgcagaggctcatgctgctcctgagaagcccccagacatgcagcacagaagctcagtccagacgcaaggtgaagtgatcacactactgctgtccaaggcccagagtgctgggtcagatcaggaaagccatggcgcccagagccccctaggggaagggcagaacatggctgtgctttcagctggtgacccagatcccagcaggtgtctcaggtcaaacccagctgaggcctcagacctcctccctccagtagctggtggtggggacaccatcacacatcagcctgactcttgcaaagctgcccctgagcaccggtcaggcatcaccgctttcatgaaggtcctgaacagtttacagaagaagcaaatgaacaccagcttgtgtgagcggatccggaaggtttatggagacctggagtgtgaatactgtggcaaacttttttggtaccaagtgcattttgatatgcatgtccgcacccacacccgggaacatctgtattattgctctcagtgtcattattcttccatcaccaaaaactgccttaaacgccacgtaattcagaaacacagtaacatcttgctgaagtgtcccaccgatggctgtgactactcaactccagataaatataagctacaggcacatcttaaagttcacacagcactggacaaaaggagttattcttgtcctgtttgtgaaaagtctttttcagaggatcgattgataaagtcacatatcaagaccaaccatcctgaggtctccatgagcaccatttctgaggttctcgggaggagggttcagctgaaagggctaattggaaagagagccatgaaatgcccatattgtgacttttatttcatgaagaatggctcagaccttcagcgtcatatttgggctcatgaaggtgtgaagcccttcaagtgttctttgtgtgagtatgcaactcgtagcaagagtaacctcaaggctcatatgaatcgtcacagcactgagaaaacccacctatgtgacatgtgtggcaagaaattcaaatcaaaagggacactgaaaagtcacaaactccttcacactgcagatgggaagcagtttaagtgcacggtgtgtgactacacagcggcccagaagccacagctgctgcggcacatggaacagcatgtctccttcaagcctttccgctgtgcccattgccattactcctgcaacatatctggctctctgaagcggcactacaacaggaagcaccctaatgaggagtatgccaacgtgggcaccggggagctggcagcggaggtgctcatccagcaaggtggtttgaagtgtcctgtttgcagctttgtatatggcaccaaatgggagttcaataggcacttgaagaacaaacatggcttgaaggtggtggaaattgatggagaccccaagtgggagacagcaacagaagctcctgaggagccctccacccagtatctccacatcacagaggccgaagaagacgttcaagggacacaggcagcggtggccgcgctccaggacctgagatacacctctgagagtggcgaccgactggaccccacggctgtgaacatcctgcagcagatcattgagctgggcgccgagacccatgacgccactgcccttgcctcggtggttgccatggcaccagggacggtgactgtggttaagcaggtcaccgaggaggagcccagctccaaccacacggtcatgatccaggagacggtccagcaagcgtccgtggagcttgccgagcagcaccacctggtggtgtcctccgacgacgtggagggcattgagacggtgactgtctacacgcagggcggggaggcctcggagttcatcgtctacgtgcaggaggccatgcagcctgtggaggagcaggctgtggagcagccggcccaggaactctagaggacatgtggcatcggatggccacagggcggggctgccaggctctgcaggcacccagggtggggaggccacccttcctgccctacccgcagaatggtgctctcctttgccctccctgcccagcagcctgataggactctcctagtccaacttggggtgggcaaggcagtcagcatcaccagcaacaccacaggaccctcaccccagcatagacacacaccccctgacccttaccatctgcttcctgaaagacttcagtgtcagctcccctacacacaccccacaccttcaccccttgcttcaagattcaaacagagactcccagtccccctcagcatcttccctgaatcacagccccagctccttgacccccatctaggtgccaaatgttcatctgcaaccgctatgcagtctggtgagagggagacagccatcacatagaaagtgaccgtacgggtttttaatcactgctgggtggggtgggggtagggggattgtcctggctttgtcgacaaagtcccacttccccgagtattaagggcccttggtatcaagtgaggtaaattcacccatcacagggtctcgccctaccatcctggaattatttcacttttaagataaatgcactatttcactgttcgcctcccattctaaggaggtgaggtggttggaataaaaacagttcctgtc

SEQ ID NO: 1362 - DNA, 8008 bp, Homo sapiens
acaggttatgagtgccagtgagccgccttagatagaagcatcgtcagcactttattaatgatggatagtgagaataaacccgaaaatgatgaggatgaaaagataaacaaagaagcacaagacttgacaaagctttcatcccataatgaagacggtgggcctgtatctgatgtgatagcaagtttccctgagaattctatgggcaaaagaggtttttcagaatcatcgaactctgatagtgttgttataggagaagacagaaataaacatgcttccaaacgcaggaaattagatgaggcagagccccttaaatctggaaagcaaggtatttgtagattagaaacttctgagagctcagtcacagaagggggtattgcattagatgaaacagggaaggagacctttctgagtgactgcacagttggaggcacatgtctcccaaatgccctctccccttcttgcaattttagcactattgatgttgtttctctgaaaacagacactgaaaaaacatctgctcaggaaatggtttcccttgatctggaaagagaatctcctttccccccgaaagaaattagtgttagttgtaccattgggaatgtagatacagttctcaaatgcagcatctgtgggcatttgttttcttcttgctctgacttggaaaaacatgctgagtctcacatgcagcagcctaaggaacatacctgttgtcactgcagccacaaagcagagagcagctcagcactacatatgcatatcaaacaagcacatgggccacagaaggtcttttcctgtgatctttgtggttttcagtgttcagaagaaaacttgttgaatgcacattatcttggcaaaacacatctccgtcgtcagaatctggctgctcgtggaggatttgtacagatcttaacaaaacaaccttttcctaaaaaatcacgtacaatggcaacaaaaaatgttcactcaaaaccaagaacttctaaatcaatagcaaagaatagtgattcaaaaggattacgaaatgtgggaagcacgtttaaagatttcagaggaagtatttctaaacaaagtggtagtagcagtgagcttcttgttgaaatgatgccttccagaaatactttgtcacaggaagtagagattgttgaagaacatgttacttcccttggtctagctcagaatcctgaaaaccagagtagaaagctagacaccttagtaacctcagagggtctcttagagaaattggaatctacaaaaaatacccttcaggcagcacacggtaacagtgtaacctcgaggccaagacctgagcgaaatattctcgtgttgggtaatagctttcgtcgacgaagcagcactttcaccttgaagggccaggcaaagaaaaggtttaatcttttaggaattaaaagaggtacaagtgaaactcagaggatgtatatgaaacacttgagaacacagatgaaaacacacgatgcagaatcagtgctgaaacacctggaagcgtgcagcagtgtgcagagagtgtgtgtgactacctcagaaacccaggaggcagagcagggccaggggagtgcccgtcctccggactccgggctgcattccctgacagtgaagccagcttctggctctcagacgttgtgtgcttgtacagactgtgggcaagtagctacaaataggacagatttggaaatccatgtgaaaaggtgccatgccagagagatgaaattttactgccgtacttgtgacttctctagtatgtcaagaagggacttagatgaacatttgcacagtaaccagcatcagcaaactgcttctgtcctgagttgtcagtgttgttcatttatatccttggatgaaataaatcttagagaccacatgaaggaaaagcacaatatgcattttctttgcaccccttgtaatctgttctttttgtctgaaaaagatgtggaagaacacaaagccaccgagaagcatattaattcattggttcaaccaaagactttgcaatcatctaacagtgatttggttttacagactttacctttgagtactttagaatcagaaaacgcaaaagagtctatggatgactcaggaaaagcatctcaggaagaacctctgaagtccagggtaagccatggtaatgaagtgaggcattccagtaagcctcagtttcagtgtaagaagtgtttttataaaacaagatcttctactgttctcacgagacatataaagcttcggcatggtcaagactatcattttctttgtaaagcttgtaatctttattcattgagcaaagaaggaatggagaaacacattaaaagaagcaagcatcttgaaaatgctaagaaaaataatattggcttaagctttgaagaatgtattgaaagggtatgtataggtgcaaatgataaaaaagaagagtttgatgtttccggaaatggaaggattgaaggccatataggtgtgcaattacaagagcattcctatcttgagaagggcatgctggcgtctgaggaactgtcacagtctggtggtagcaccaaagatgatgaattagcttcaaccactactccaaagagagggagacctaaaggtaacatctcacggacgtgttcacactgtggccttttggcctctagtattacaaacttgactgttcacattagacgaaaacacagtcaccagtatagttatttatgcaaagtgtgtaagtattacactgtaactaagggagatatggaacgtcattgtgccaccaagaaacataaaggacgggtagaaatagaagcaagtggaaaacacagttcagatatcattgttggccctgaagggggtagccttgaagctggtaaaaagaatgctggctcagcagtgaccatgtcagatgaacatgctaacaaaccagctgagtcacccacctccgttttagagaagccagatcgtggaaactcaattgaagctgaagttgaaaatgtatttcattctctagatggagaagttaacagccatcttcttgataaaaaggagcaaatatcttcagagccagaggacttcgcccagccgggggatgtgtactcccagagagatgttacaggcacaggtgagaataagtgtttgcactgtgagtttagtgctcactcctctgcttctctagagctgcatgtaaaacggaaacatacaaaagagtttgagttttattgcatggcatgcgattactacgcggtgactcgtcgcgagatgaccaggcatgcagcaacagagaagcacaaaatgaaaaggcagtcttatctcaactctgctaatgtagaagctggttctgcagacatgtccaaaaacatcattatgcctgaagaagagcatcaacaaaattctgaggaatttcaaataatttcaggtcaaccatctgatactcttaaatctagaaatgctgcagattgctctattttaaatgagaatactaatttagatatgtctaaagtgctctgcgctgctgactctgtagaagttgagactgaagaagaatctaatttcaatgaagaccattccttttgtgagactttccaacaggctcctgtcaaggataaagttaggaaacctgaggagatgatgtcacttactatgtcctcaaactatggctccccaagcagatttcaaaatgaaaattcaggaagctctgccttaaattgtgagacagcaaagaaaaaccatgagatatcgaatgatgcaggtgagctgcgtgtccattgtgagggtgaaggaggaaacgcaggagacggtggaggtgttgtcccccacagacacctgtgccctgtgacgctcgatggggagcgctcggctgaaagccctgtgctcgttgtgacaagaataaccagagaacagggaaatctggagagcgggggtcagaacagagttgcacgtgggcatggtttggaagacttgaaaggtgtccaagaagatcccgttctggggaataaggaaattctgatgaattcacaacatgaaacagaatttattttggaggaggatggcccagcttctgatagcacagttgaaagtagtgatgtctatgaaactataattagtattgatgataaagggcaggccatgtacagttttggtcgatttgactcctccataataagaataaagaaccctgaagatggtgagttgatagaccagtctgaagagggcttgatagcaacgggagtgagaattagtgagctgcccttgaaagactgtgctcaaggtgtgaaaaagaagaaatctgagggcagttccattggtgagtctacacgaattcgctgtgatgattgtggcttcttagcagatggactgagtggactgaatgttcacatagccatgaagcatcctacaaaagagaagcacttccattgtttactctgtggaaagtcgttctataccgaaagcaaccttcaccagcatctggctagtgccggccacatgagaaatgagcaggccagtgtggaggagcttccggagggaggggccacctttaaatgtgtcaagtgcacagagccctttgattctgaacagaatttatttttacatattaaaggacagcatgaggaattgctgcgggaggtgaataagtatatagtggaagacactgagcaaatcaaccgcgagagggaggaaaaccagggaaacgtctgcaagtattgtgggaagatgtgtcgaagcagcaactcgatggccttcctggcacacattcgcactcacacaggatcaaaaccattcaagtgcaagatatgccattttgcaacagctcagcttggagatgccagaaaccatgtgaaaaggcaccttgggatgagggaatacaagtgtcatgtctgtggggttgcttttgtaatgaagaagcacttaaatactcatctactaggcaagcatggagttggcaccccaaaagaaaggaaatttacatgccacttatgtgatagaagtttcacagagaagtgggccctgaacaaccacatgaaactccacacgggagaaaagccgtttaaatgtacctggcccacgtgccattactcattcctcacagcctccgcaatgaaagaccactacaggacgcacacaggcgagaagtcgtttctgtgtgacctctgcggctttgccggcgggacccgccacgccctcaccaagcatcgcagacagcacacaggagaaaaacctttcaagtgcgatgagtgtaactttgcctccacaactcagtcccatttgactcggcataaacgtgtccacactggagaaaagccctacagatgcccctggtgtgactacaggtcaaactgtgctgaaaatatccgcaaacacattctgcatactggcaaacatgaaggagtcaagatgtacaactgtcccaagtgtgactacgggaccaacgtcccggtggagttccggaaccatttgaaggaacagcatcctgacatcgaaaacccggacctcgcttacctgcatgctggcattgtttccaagtcgtacgagtgccgtctaaagggacaaggagccaccttcgtggagacagacagccccttcaccgcggcggccttggcagaagagcccctcgtcaaggagaagcccctcagaagcagcaggaggccagcgccgccccctgagcaggtgcagcaggtcatcatcttccagggctacgacggggagtttgccctggacccctcggtggaggagacggccgccgccacgctgcagacgctggccatggccggccaggtggcccgggtggtgcatatcacggaggatggccaggtcatcgccacgagtcagagcggggcacatgtaggcagcgtggtgcccggacccatcctccccgagcagctggctgatggagccacccaggtggtcgtcgtggggggctccatggaaggccacggcatggatgagtccctcagtccaggtggcgctgtgatacaacaggtgaccaagcaggagattttaaacctctcggaggctggagtcgctccccccgaggcatcctcagccctggatgcattgctctgtgcggtcactgaattaggggaggtggagggcagggctgggctcgaggagcaaggcaggcccggcgccaaagacgtgctgatccagctgcccgggcaggaggtctcccatgtggctgccgaccccgaggcccccgagatccagatgttcccacaggcccaggagagcccggccgccgtggaggtgctcacccaggtggtccatccctcagcagccatggcctctcaggagcgggcacaggtggccttcaagaagatggtccagggcgtcctccagtttgctgtgtgtgacacggccgcggccggccagttggtcaaggacggtgtcacccaggtggtggtgagcgaagagggtgccgtccacatggtcgccggggagggtgcccagatcatcatgcaggaggcgcagggcgagcacatggatctggtggagtccgacggggagatctcgcagatcatcgtgacggaggagctggtccaggccatggtgcaggagtccagtggcggcttctccgagggcaccacgcactacatcctgacagagctgcccccaggggtgcaggacgagccgggcctgtactcccacaccgtgctggagactgcggactcgcaggaactcctgcaggccggggccacgctaggcacagaggccggggccccaagcagggcagagcagctggccagcgtggtcatctacacccaggagggctcctcggccgcggcggcaattcagagccaaagagaaagcagcgaactccaggaagcatgagacgcgcggcacctttactcagcacagggcaggtgtgggaaggtccagcttcggtgggggaccgtgttccctgagcttcatctgaaaccttcaaaaccatgaggacaaggctcccgtgagctctgagcatgccctcccagcgagagtcacactggccaccagccaggcgcccacagagggtaccgtgggctgggcctcggggagcaggctgccaagtgcaggggagggccgggcgcaggccgcacagggagctccggtccactgggggcccttcgatcagtggcctcccgcttcgtcctggccgctgtgctgaagagaagccaagtgttgttggtgtttttctctcccaagtgttttcccatttcagttatcagaaggtcatggccgtggggaaagtggtgaagatacccctcctggcttggggtgcacctgcttgtgcagtcagcatgtagctgcctttccatttcattctctactgggctaaaaattgcagctacaagtgttaccatcttgaagcagtccacttccattcaattttttttttttaattttagaataacagtgtccccataccaaaggaagcctgctagctcatttcatgtataaatttcccatcttcaaacagtttaggtgtatttgttgctctggtcacattctgcataaaagaaatcctcttaagcctatggttaagaaaagccttgaagtttatattcagttaaaatatatgtcggtggagatagccagtgcttctaattttgacttagtttcatacagtaaagcctaaatgtgaaacgcacacgctggaagatattgttcctatcaatattttgctttttataacaagggtttgttcatattgatgccatttttgcaggatttcttcgtgatttctgtccatatgaaaatgctgacattaaacattaacacatggagaccgtgccctgtggccctgccgtggctgccagcatggtctgtgtttccttgtggattcacctgtggccctgctgtggccaccagcatggtctgtgtcctcgtggattcactgcagctgtcggatgcgagtttctgtcataatcatttgtttcctgatacaattgttcttattcttttccaaaactgtaaaataatctcctccctcaaatgcaaaggttgtttttgttctgtttctgttttctttgaaataaaattataacgttaaaagatc

SEQ ID NO: 1363 - DNA, 2441 bp, Homo sapiens
gctttcccagctagtcgaatcactggtgcacctccggaatccgaggttcgcattgctctcggacagagttctgcctccccagtactcccaaactcccagtcctgtgcaccaatgaggtccagctctgaggcttctttcctgagaaaaaaatttggaagtccgtgactgtttcctggaggagctgagaagaggaagctcacttccggcgtagggaggctttctgacccggaatggaggaggcggaggagctgctcttggaggggaagaaggcgctgcaactcgcccgcgagccgcgcctgggcctggacttaggatggaacccttccggagaaggctgtacgcagggcctcaaagacgtcccacccgagccgacccgagacatcctcgctttaaagagccttccccggggcttggcccttggcccctcactcgccaaggaacagcgcttgggggtctggtgtgtcggggaccccctgcagcccggcctgctgtgggggccgctggaagaggagtctgcctccaaggagaagggcgagggagtaaagccacggcaggaggagaacctgtcattaggcccatggggagacgtgtgtgcctgtgagcagagttctggctggactagcttggtacaacggggcaggctggagagtgagggaaatgtggccccagtgcggatcagcgagaggcttcatctgcaagtgtaccagctggtgctgccaggctctgaactgctgctgtggccccagccttcctctgagggcccaagtctcacccagcctgggctggacaaagaggcagctgtagcagtggtgacagaagtggagtctgctgtacagcaggaagtggcctcccctggggaggatgcagcagaaccttgcatagatcctggttcccagtcaccctctggcatccaggcagagaatatggtgagccctggacttaagttcccaacccaggaccgaatttccaaggatagccagccacttggcccattgcttcaggatggcgacgtggatgaggaatgcccggcccaggcacagatgccacctgaacttcagagcaattcggctacccagcaggacccagatggcagtggagccagtttctcatcttctgccaggggcacccagccgcatggctacctggccaagaagttacacagccccagtgatcagtgcccacccagagcaaagaccccagagcctggagcccagcagtctggcttccctacactctcgcggagccctcctggcccagcaggaagctccccaaagcaggggcgacggtaccggtgtggagagtgtggcaaggcattcctacagctgtgccacctaaagaagcacgcatttgtgcacacgggccacaagccctttctttgcactgagtgtggcaagagctatagctcagaggagagcttcaaagcccatatgctgggccaccgtggggtgcggcccttcccctgtccacaatgcgacaaggcctatggcacccagcgagacctcaaagagcaccaggtggtacattcaggtgcccggccctttgcttgtgaccagtgtggcaaggcctttgcccgccggccctccctgcggctgcatcgcaagacccaccaggtgccagctgcccctgccccttgcccatgccctgtgtgtgggcggcccctggccaaccagggctccctgcggaaccatatgaggctccatacaggagaaaagcctttcctgtgcccgcactgtggccgggcgtttcgtcagcggggcaacctgcgtgggcatttgcggctccacaccggggagcgtccttaccgctgcccacactgtgccgatgccttcccccagctgcctgaactgcggcgccatctcatctcacacaccggggaggcccacttgtgcccggtgtgtggcaaggccctccgagacccacacacgctccgagctcacgagcgtctgcactccggagagaggccctttccctgtccccagtgtggccgtgcttacacgctggccaccaagctgcggcgccacctcaaatctcacttggaggacaagccctaccgctgccccacctgtggcatgggctacaccctcccgcagagcctcaggcggcatcagctcagtcaccggcctgaggcaccctgcagcccaccctctgtgccttctgctgcttctgagcccactgtggtgctcctgcaggctgagccacaactgctggacacacacagagaggaggaagtctcccccgccagggatgttgttgaggtcaccatttcagaaagccaggagaagtgctttgtggtgccagaggagccagatgccgcccccagcctggtgctaatccataaggacatgggcctcggcgcctgggcagaggtggtggaggtggagatgggcacctgacagctttgccttttgctgacacagctccataaagactcgtgctttctc

SEQ ID NO: 1364 - DNA, 5428 bp, Homo sapiens
ggagcgagcgagtgcccagggtgaatcaatggaaaccccctcacgaagccggggaaacacttcagccgcagccaaatagcattgattattttccttcacttccctcaccgccgtgaatttatttatttatttttttccgtctccgtccctgacgccccggagcgagcgctggagggagggaggaggaggggaaaaaagaggaatcaacacatcggagaagtcccttccaagagccgccccctcccctccccgcctcgcgctgctcggtggccgcggttcgactcccgtccctgcttccagctgaggtggtactggctgtcacgctgacatgagcccccagcactcctccgtctaccatggccacccttaactcagcctctaccactggtaccaccccctcccctgggcacaatgccccgtccctgccttcggacaccttctcctccagcaccccctctgatcctgtcaccaaagatccccctgctgcctcctccacctctgagaacatgaggtcctcagagccagggggacagctcctggagtcgggctgtggcctcgtcccaccaaaggagattggggagccccaggaagggcctgactgtggtcacttcccaccaaatgacccaggggtggaaaaggacaaggagcaggaggaggaagaagaagggctccctcccatggacctaagcaaccacttattcttcacagctggaggtgaggcctacctagtggccaagctgtccctgccaggtggcagtgaactcctgttaccaaagggcttcccctggggtgaggcgggcatcaaggaagagcccagtctgcccttccttgcctacccacccccctcacacctcactgcccttcacatccaacatggctttgacccaatccaaggctttagctcttctgaccaaattctgtcccatgatacctcagcaccatctccggctgcctgtgaggaaaggcatggagctttctggagctaccagctggctccaaatccacccggagatcccaaagatggccccatggggaacagcgggggcaaccacgtggcggtcttctggctctgccttctgtgccgcctgggtttcagcaagccccaggcctttatggatcacacacagtctcatggggtgaagctaacccctgcccaatatcagggcctgtcaggtagcccagctgtactccaggagggagatgaaggctgcaaggccctcataagctttctggagccaaaactccctgctcgcccctcttctgacataccccttgacaacagcagcacagtgaacatggaggcgaatgtggcccagacagaggatggcccccctgaggcagaagtccaggcccttatcctcctggatgaagaagttatggccctcagcccaccctctccacccacagccacctgggaccccagcccaacccaagccaaagaatcgccagtagcagcaggcgaggcagggccagattggttccctgaggggcaagaagaggatggagggctctgccccccactcaaccaaagctcacccacctccaaggaggggggcactctccctgccccagtgggctcccccgaagaccccagtgacccaccccagccctatcgcctagctgatgactacaccccagcccctgcagccttccagggcctcagcctgtccagccacatgtccctgctccactcacgcaactcctgcaagacactcaagtgtcccaagtgcaactggcactacaagtaccagcagaccctggatgtgcacatgcaagagaagcaccctgagagcaacagtcactgcagctactgcagtgctgggggcgcccacccccgccttgctcgtggagagagctacaactgtggctacaaaccctaccgctgtgacgtctgcaactactctacaaccaccaaaggcaacctcagcatccatatgcagtctgacaagcacctggccaacctacagggcttccaggcgggccctggtgggcagggaagtccaacagaggcatcactcccaccctccgcgggagacaaagagcctaagaccaaatcatcctggcagtgcaaggtgtgcagctacgagacaaacatctcccgtaacctgcgcatccatatgacctctgagaagcacatgcagaatgtcctaatgctgcaccaggggctgccgctgggcctgccacctggattgatggggccaggccctcctcccccaccaggggctacccccactagcccccctgaactcttccagtactttgggccccaggccctagggcagcctcagactcccttggctggcccggggctgaggccagacaagcccctggaagcccagctacttctcaatggtttccaccacgtaggagcacctgcccgcaagttccccacatccgcccctggaagcctatcccctgatgcccacctgcctccaagtcagctcctgggttcctcatctgacagcctgcccacctcaccacccccagacgacagcctgtccctgaaggtgttccgctgcctagtgtgccaggccttcagcacagacagcctggagctgctgctctaccactgcagcataggccggagcctcccggaagctgaatggaaggaggtggctggtgacacccaccgctgcaagctttgctgctatggcacccagctcaaggccaacttccaactccacctcaagactgacaaacatgctcagaagtaccagctggcagcccacctgcgggaggggggtggagccatgggcaccccttccccagcatccctgggagatggggctccttatgggtctgtctccccactacacctgcgctgcaacatctgtgactttgagtccaacagcaaggagaagatgcagctgcatgccaggggtgcagcccacgaagaaaacagccaaatctataaaaggacagaaactggactcttaataaaatgatctcttaggccctaccagttctaatactgtaattttccctctatcttctgtgtgggtgtttctttttgttggcttttcatactctcctacctgctgattgagccatccattttctccttcattgactggctgcttgtcctgcttcctctgtcctatgtcctcccttccctgatgccacacctctttaagctgactctccccccatcctacacagggaaggctcctgtcacccccttagctgagccacccacccctgagaaagatgcccagaacaagacagaacaattgggtgagttttccctcccttccccccagtcctcctaccttctgagacgctcacgggaccttgcagtaatccaggagcccagcaatgtctgtgctcaaggagcaaaactgattaaagaaagggctcatcagggggaagggaggctgagccacgagaggctaggcacttccgccctctttgagaactcagacctgaccatcctactgacccggagtcagcccttgccaagcctcacctatctactgagtttcctgccctttctctagtgcccaactccctaccctggaagctctctgctacaaatcatcttgagggctgtcagggttccttaatctcctcttctttcatcctcagcttcagaagagacagaaaacaagactggcccttccagagacagtgccaaccagaccacggtcagaattggggtaactgggaagagctgaagtgggggcctggctttactgagatctgctcatattctaaaggcagacgtaattttgtcatgctttgacttatttcactcagaatagcacagttaagaaattccacccagatccagttccacatgttcagcactttcgggggcagagctggcccagcagggtcaagcacagagggagatgataggagggagacagcaggaacttgagggaaagatgaataaaggaattgtgctgagagtaggaaagagtgggggtacatgctggaaggaggggaggagaaaggcaaaagcaaacaaccagctactgcccagctctttatcccttagttaggagcagaaagacaagacaccggtgttcctaccctacaaaacgccctgagcctggatggaactgtcctggcatcctcttactaagggtaggggcaccaaccaaatgattcacactgacagcatgtgccacaaatctctaaatccccaggactcagacctaggcagcacccaggaatggcagctctgtgttctgaggggattcccagcctctggtttgagatgccatcctgtgcctcacagctctccaaactggactacaatatgtaacatttattgttattgcaatacgcagtgttactgcattactgcaagctgaagtaatgccttatgtcctcagcatcttttcttcctaactcctgctcccgccaacagacctcttccagatgtctgctccaggggctaggtgcgttaagatgagcatctggatccccttcctttacagtcatcccctccctgacacacaggcctgtgccactggtgccagcctggatgcaggctgggtaggtctggcagtcaggtgatggtggggcctctggcagcctcacccctctggaagtgtggctgagaatgtgctgagagggctgggccagaattttcctgggccactgggggagctgtggtgtttattcacattaggaaaaagaagaaggaaaaagaaagatggaaaataaggtgggagctgctgagcctgagggaggatgagctggcttctgagcagacaggtagggcccctttccaggtgatggttcacagaggcagagtgggcagggacaagggagcctctgggtccagaaaatgcccagaggaaatggaaccatttcacagagaagacacgacaggataggataggtaagagaagaaaactaaatccaaggtgggggcagtaggtacagagccatctgttagctggagagttgaggcaggcagcaaagactgggaaagacacaccaagaaaaggcagagaggccaggatggtggaagagggccagacaaagaaggagtgcaaggtagcggcctaagctaggcctttgtcccaatccaagggaaagtggggaggagccagctctcaggactgtggctggaggctgggtctgctataatgccttcctatctggctagttcctcttcaattaggagtgagaggccaagcgtggtggctcacgcctgtaatcccagcactttgggaagccaagatgagtagatcacctggcatcaggagttcaagaccaacctggccaatgtggcaaaaccctgtctccactaaaaaatacaaaaattagctgggcgtggttgcacacgcctgtaatcccagctgcttgggaggctgagggcaggagaattgcttgaacctggaaggcggaggttgcagtgagccgagatcacgtcactgcactccggcctgggtgacagagccagactccatct

SEQ ID NO: 1365 - DNA, 1629 bp, Homo sapiens
acaggagcaaattcctgtgaacatgaccactatgaaaaacatctcagccacaaacaagctcccacccaccatcagaaaattcatcctgaggagaagctttatgtgtgtactgaatgtgtaatgggcttcactcagaagtcacatctgtttgagcatcagagaattcatgctggagaaaagtcccgtgaatgtgacaaaagcaacaaagtcttcccccagaaaccccaggttgatgtacatccaagtgtttatacaggagaaaaaccctatctgtgtactcaatgtgggaaagtctttaccctcaaatcaaacctcattacacatcaaaaaattcataccgggcagaaaccctacaaatgcagtgaatgtggaaaagcctttttccagagatcagacctctttagacatctgagaattcatacaggagaaaaaccttatgaatgcagtgaatgtggaaaaggcttctcccagaactcagacctcagtatacatcagaaaactcataccggagagaaacactatgaatgcaatgaatgtgggaaggctttcacaagaaaatcagcactcaggatgcatcagagaatccacacgggagagaaaccttatgtatgcgctgactgtgggaaggccttcatccagaaatcacatttcaacacacatcagagaattcatactggagaaaagccgtatgaatgcagtgactgtgggaaatccttcactaagaagtcacaactccatgtgcatcaaagaattcacaccggagagaaaccctatatatgtacagaatgtggaaaggtcttcactcacaggacaaacctcaccacacatcagaaaactcatactggggaaaaaccctatatgtgtgctgaatgtggaaaggcttttactgaccagtcaaatctcattaaacaccagaaaactcacactggagagaaaccctataagtgcaatggctgtggaaaagccttcatatggaagtcgcgcctcaaaatacatcagaaatctcatattggagagagacactatgaatgcaaggactgcgggaaagccttcatccagaaatcaacactaagcgtgcatcagagaatccatacaggagagaaaccgtacgtttgtcctgaatgcgggaaggcctttatccagaaatcgcacttcattgcgcatcatagaatccatactggagagaagccttatgaatgcagcgactgtgggaaatgcttcactaagaagtcacaactccgtgtgcatcagaaaatccacacaggtgagaagcccaatatatgtgctgaatgtggaaaggccttcactgaccgatcaaatctcataacacatcagaaaatccacactagggagaaaccctatgaatgtggtgactgcgggaaaaccttcacctggaagtcacgcctcaatatacatcagaagtctcatactggagaaagacactatgaatgtagtaaatgtgggaaagctttcatccagaaagccacactaagtatgcatcagataattcatacaggaaagaaaccttatgcttgtacagaatgtcagaaggcctttactgacagatcgaatctcattaaacaccagaaaatgcatagtggagaaaaacgctataaagccagtgactga

SEQ ID NO: 1366 - DNA, 2620 bp, Homo sapiens
gcgcacgtacacacgaagggcctgctgactacatctgccggaaagcatcgggccaagcctttctccattttgcggtctaggaagtagcagaggccccttcctgtagggagttgccatggagacgcggtggggcaccgacggagttctaatgacggccgtgattggtgcaggatcctgctaatctcaggaaggcccgtagagaagggcagacactggcctcagatacctgacctggtaccctctatgaggcctgcggtgctgggctccccagaccgagcacccccagaagatgaggggcctgtcatggtgaagctagaggactctgaggaggagggtgaggctgccttatgggacccaggccctgaagctgcacgcctgcgtttccggtgcttccgctatgaggaggccacagggccccaagaggccctggcccagctccgagagctgtgtcgccagtggctgcgtccagaggtacgctccaaggagcagatgctggagctgttggtgctggagcagttcctgggcgcactgccccctgagatccaggcccgtgtgcaggggcagcggccaggcagccccgaggaggctgctgccctagtagatgggctgcgccgggagccgggcggaccccggagatgggtcacagtccaggtgcagggccaggaggtcctatcagagaagatggagccctccagtttccagcccctacctgaaactgagcctccaactccagagcctgggcccaagacacctcctaggactatgcaggaatcaccactgggcctgcaggtgaaagaggagtcagaggttacagaggactcagatttcctggagtctgggcctctagctgccacccaggagtctgtacccaccctcctgcctgaggaggcccagagatgtgggaccgtgctggaccagatctttccccacagcaagactgggcctgagggtccctcatggagggagcaccccagggccctgtggcatgaggaagctgggggcatcttctccccagggttcgcgctgcagctaggcagcatctccgcaggtccaggtagtgtaagccctcacctccacgtcccctgggacctcggcatggctggcctttctggccagatccaatcaccctcccgcgaaggtggctttgcgcatgcgcttctgctccccagcgatctgaggagtgaacaggaccccacggacgaggatccctgccggggtgtgggccctgctctgatcaccacccgctggcgctcccccaggggccggagccggggccgccccagcactgggggcggggtggttaggggcggccgttgcgatgtatgtggcaaggtgttcagccaacgcagcaacctgctgaggcaccagaagatccacacgggtgagcgaccattcgtgtgcagcgagtgcggccgcagcttcagccgcagctcgcacctgctgcgccaccagcttacgcacaccgaggagcggccgttcgtgtgcggcgactgtggccagggcttcgtgcgcagcgcgcgcctggaagagcatcggagagtgcacacgggcgaacagcctttccgttgcgctgagtgcggccagagcttccggcagcgctccaatctgctgcagcaccagcgcatccacggcgatcccccgggccctggcgctaagcccccggcccctcctggtgcgcccgagcctcccggcccctttccgtgcagcgagtgccgcgagagcttcgcgcggcgcgccgtgctgctggagcaccaggcggtacacacgggcgacaagtcctttggctgcgtcgagtgcggcgagcgcttcggccgccgctcagtgctgctgcagcaccggcgcgtgcacagtggcgagcggcccttcgcctgtgccgagtgcggccagagcttccggcagcgctccaacctgacgcagcaccggcgcatccacaccggggagcggcccttcgcctgcgccgagtgtggcaaggccttccgccagcggcctacgctcacgcagcatctccgcgtacacacgggcgagaaaccctttgcctgccccgagtgtggccagcgcttcagccagcgcctcaagctcacgcgtcatcagaggacacacaccggcgaaaagccctaccactgcggtgagtgcggcctgggcttcacgcaggtctcgcggctcaccgagcaccagcgcatccacacgggcgaacggcccttcgcctgccccgagtgcggccagagctttcggcagcacgccaacctcacccagcaccggcgcatccacacgggtgaacggccctacgcatgccctgagtgtggcaaggccttccgccagcggcccacgctcacgcagcatctgcgcacccaccgacgagagaagcccttcgcctgccaggactgtggccgccgcttccaccagagcaccaagctcattcagcaccagcgcgtccacagcgccgagtagctccagccgggacgcactgtgtccgccatggtcagaacacctacctcccctggttattgtgaggctggcgattacataagtataagcaggtccgcccagggcttggctactgtaggtgtccaataaacagtagatggaaactgggtctccacccaaaaaaaaaaaaaaaaaa

SEQ ID NO: 1367 - DNA, 2320 bp, Homo sapiens
gtgagcgcctgagagtctttttgcctttcagagttaaggcctcactggcctgggaaaataattgctgccttttgcatccgcgttggctccgtccccaggatcttcccggttcagggacctggcgatttctgagtgttccggaatcccaataaccctgtttaaagaggaatggagattgccactgtccatttagattaatgaggtgtcctgaagtgatggtgacatcaatgaaaggagggttctgacacgttctcacctcgcgggatggcagctgctgatttgtcccatggacattatctttctggggacccagtttgccttcatgaagaaaagacaccagcaggaagaatagtggctgactgcctaacagattgttatcaggattcagtgacctttgacgatgtggctgtggacttcacccaggaggagtggactttactggactcaactcagagaagcctctacagtgacgtgatgctggagaactacaagaacctggccacagtaggaggtcagatcatcaaacccagtctaatctcttggttggaacaagaagagtcaaggacagttcagggaggagttctccaaggatgggaaatgcgacttgaaacccagtggtctatacttcagcaggactttttgaggggtcagacatccattgggatacaattggaaggaaaacacaatggaagggaactctgtgactgtgagcaatgtggagaagtcttcagtgaacactcatgccttaagacgcacgtgagaactcaaagtacagggaacactcatgactgtaatcagtatggaaaagatttccttaccctgtgtgagaaaacctctactggtgagaaactttctgagtttaatcagagtgaaaaaatcttcagcctgacaccaaatattgtataccagagaactagcacacaagaaaagtcatttgaatgtagtcactgtggaaaatccttcattaatgagtcataccttcaggcacatatgagaactcacaatggagaaaaactctacgaatggaggaattatgggccaggttttattgactctacaagcctttctgtgcttatagaaaccctcaatgcaaaaaagccctacaaatgtaaggaatgtggaaaaggctatagatacccagcctacctcagtattcacatgcgaacccacactggggagaaaccatatgaatgtaaggaatgtgggaaagccttcaattattccaactcatttcagatacatggaagaactcacactggagagaaaccctatgtatgtaaggaatgtgggaaagccttcactcagtactcgggccttagtatgcatgtacgatctcacagtggagacaagccctatgaatgtaaggaatgtgggaaatccttccttacatcctcacgccttattcaacatataagaactcacactggagagaagccttttgtatgtgttgaatgtgggaaagcctttgcagtttcctcaaatcttagtggacatttgagaactcacactgaagagaaggcctgtgagtgtaagatatgtgggaaagtatttgggtatccctcatgtcttaataatcacatgcgaacgcacagtgcccagaaaccatacacctgtaaggaatgtgggaaggcttttaactattccacccaccttaaaattcacatgcgaatccacactggagaaaaaccctatgagtgtaaacaatgtggaaaggccttcagtcattccagttcatttcaaatacatgaaaggactcacactggagagaaaccctatgaatgcaaggagtgtgggaaagccttcacgtgttccagttcctttagaattcatgaaaaaactcacacagaagagaaaccctataaatgtcagcaatgcgggaaagcttacagtcatccccgttcacttcgaagacatgaacaaattcactagtgagaaactgtccatgtaataaatgtgggaaagctctcatttgttccagttcactttaaagacatgaatgaactcactctggagagaagaagctgcatgaaaattacttaattcctgtaatcccagcattttgagaggctgaggtgggtggatcacttgaggtcaggagtttgagaccaccctggccaacatggtgaaaccttgtctctactgaaaatacaaaaaatttagccaggtgtggtgggcacctgtaatcccagctacttgggaggctgaggcaagtgaatcacttgaacccaggaagcagaggttgcagtgagcagagatcatgccactgcactccagcctgggcgatggagtgagactccatctcaaaaaaaaaaaaaaaaaa

SEQ ID NO: 1368 - DNA, 5225 bp, Homo sapiens
ttggagctctgcgtctcgtcttcgttcttctgtgtcctctgctgctagaggtccagcctctgtggctctgtgacctgcgggtattgggggatccacagctaagacgccaggaccccccggaagcctagaaatgggaccattgacatttatggatgtggccatagaattctgtctggaggagtggcaatgcctggacattgcacagcagaatttatataggaatgtgatgttagagaactacagaaacctggtcttcctgggtattgctgtctctaagccagacctgatcacctgtctggagcaagaaaaagagccttgggagcctatgaggagacatgaaatggtagccaaacccccagttatgtgttctcattttacccaagacttttggccagagcagcatataaaagatcctttccaaaaagcgacactgagaagatataaaaactgtgaacataaaaatgtacatttaaaaaaagaccataaaagtgtggatgagtgtaaggtgcacagaggaggttataatggatttaaccaatgtttgccagctacccagagcaaaatatttctatttgataaatgtgtgaaagcctttcataaattttcaaattcaaacagacataagataagccatactgaaaaaaaacttttcaaatgcaaagaatgtggcaaatcattttgcatgcttccacatctagctcaacataaaataattcataccagagtgaatttctgcaaatgtgaaaaatgtggaaaagcttttaactgcccttcaatcatcactaaacataagagaattaatactggagagaaaccctacacatgtgaagaatgtggcaaagtctttaattggtcctcacgccttactacacataaaaaaaattatactagatacaaactctacaaatgtgaagaatgtggcaaagcttttaacaagtcctcaatccttactacccataagataattcgcactggagagaaattctacaaatgtaaagaatgtgccaaagcttttaaccaatcctcaaaccttactgaacataagaaaattcatcctggagagaaaccttacaaatgtgaagaatgtggcaaagcctttaactggccctcaactcttactaaacataagagaattcatactggagagaaaccctacacatgtgaagaatgtggcaaagcctttaaccagttctcaaaccttactacacataagagaatccatactgcagagaaattctataaatgtacagaatgtggtgaagcttttagccggtcctcaaaccttactaaacataagaaaattcatactgaaaagaaaccctacaaatgtgaagaatgtggcaaagcttttaagtggtcctcaaagcttactgaacataagttaactcatactggagagaaaccctacaaatgtgaagaatgtggcaaagcctttaactggccctcaacccttactaaacataacagaattcatactggagagaaaccctacaaatgtgaagtatgtggcaaagcctttaaccagttctcaaaccttactacacataagagaattcatactgcagaaaaaccgtacaaatgtgaagaatgtggcaaagcttttagccggtcctcaaaccttactaaacataagaaaattcacattgaaaagaaaccctacaaatgtgaagaatgtggcaaagcttttaagtggtcctcaaagcttactgaacataagataactcatactggagagaaaccctacaaatgtgaagaatgtggcaaagcttttaaccatttctcaatccttaccaaacataagaggattcatactggagagaaaccctacaagtgtgaagaatgtggcaaagcttttacccaatcctcaaaccttactacacataagaaaattcatactggagagaaattctacaaatgtgaagaatgtggcaaagcttttacccaatcttcaaaccttactacacataaaaaaattcatactggaggaaaaccctacaaatgtgaagaatgtggcaaagcttttaaccagttctcaactcttactaaacataagataattcacactgaggagaaaccctacaaatgtgaagaatgtggcaaagcctttaagtggtcctcaacccttactaaacataagataattcatactggagagaaaccctacaaatgtgaagaatgtggcaaagcttttaaactgtcctcaaccctttctacacataagattattcatactggagagaaaccctacaaatgtgaaaaatgtggcaaagcttttaaccgatcctcaaaccttattgaacataagaaaattcatactggagagcaaccctacaaatgtgaagaatgtggcaaagcatttaactattcctcacaccttaatacacataagagaattcatactaaagagcaaccctacaaatgtaaagaatgtggcaaagctttcaaccaatattcaaaccttactacacataacaaaattcatactggagagaaactctacaaacctgaagatgtgacagtgattttgacaacacctcaaactttttcaaacataaaataaattatactggtgagaaattctagaaatgtaaagaatgtgataaaggctttacatggttgtcacacttgattgtaggtaagataatttacattggagtaaacttctacaagtgtgaagaatgtggcaaaacttttaattaatgctcgtaccttattgcacaggaaagaatttttacttggaaaaaggtatatacacaaagaatgtggaaaagccattaatatgtgctcatatcttactcaacatcagagagtctgtacttaataaaaccattatagatgcaactagtgtcaaaagatctttcagaaaataaaagcctttaaagtgaagaagataattcattctgaagacaaacattacaaatattaagagggttgtagtaccattacttgcatcacagatcttattgtacacattttgtactaaagaaaaccctgaagcagttgctcaaatactgttcaacatcagaaaatttatattggaaaaaacccctggaaaatgtaataaatttgtaaaaacagttttgaaaaactacagcttataaaacatgagggtctataatgcttggttgatagtacaaagtttattcaacatcagggaatttatattggagaaaaaccctacaaatgtaatcagtttggaaaaacatttttaaaaaaaccacagcatagaaaacaccacagggttcatactaaaatatgtttttgcagatgcagtaaaaatgaaaaaaatttaatccgaaattaagtttatgtaaatatctgagaattcacagtagaaatatctaaggcgcggacacttcagacattacactaaatcagtgctaagtacagaaaacaacacaaaataaaacttggtggataaattatttgtatataacattaaaagaagtagaagattttcagttataattacaattaaagtatacttttatcttgaaaaaattactgatttttaaattagtgaataatgatgtaattaaactctcaaataactttatgctcttttttcattcctgctatattcacatgtgaaagcatgtgaccaattgttgctgcaccaaagatatgagagattcttttattaggtgggcattatttaaaacattttttatggaacagtaaggatattaaagtgtaagatgcagccaggcatggtggctcatgcctataatcccagcactttgggaggctgaggccggtggatcacctgaggtcaggagtttgagaccagcctgaccaacatggtgaaaccctgtctttactaaaaatacaaaaatttaccaggcacctataatcccagctacttcaaaggctgaagcaggagaatcacttgaacctggaaagtggaggtctcagtgagccgaaatcataccattgcactccaacctgggcaacaaaagtcaaactccatctcaaaaagaaaaaaaaaaaaaaaaaagatgcgtgatgaaaatgtaactggagaggctctttgtggttaacttataaaggagtgatgcaggagataggttttcagagtaatattcttctgcattatagtgacaaaagttttttattttagttaaaattggttaaattagtaagtcattttacttattgtaattttatgtaattaaatgtacatttttaaatttttagattacatgtaaatataacttttaaaaaaatgtgttaagaccattgtacattcaatgaagcattattatgcttctaactttaacctatttcaccttactcaagagtgtatgtaaaagatggtaacaatatactatttggtaacataatggactaacatttctattaatctatttcaccagtggctttcaactgcaaataagttaaagaatatttttctataggttaaatattcttttttgtcttatttaaacttactgttcttaatttctgtgggtacatagtatgattttaattaccttattttattctttgtgctattcataattttttttgtttgtttggtttttttttttgagacagagtcttgctctcgcccaggctggagtgcagtggcgcgatcttggctcactgcaagctccgcctcccaggttcactccattctcctgcctcagcctcccaagtagctgggaccacaggcgcccactacttgtttgggtttttttttggagatggagtctcgctctgtcacccaggctggagtacagtggcatgatcttggctcactgcaacccccacctccccggttcaagtgattctcctgcctcagcctcccgaatagctgggattacaggcgtccaccatcacaccaggctaatttttgtatttttagtagagatggagtttcaccatgttggccaggatggtctcgatcttctgacctcatgatctgcctgcctcggcctcccagagttctgggaccacaggcatgagccactgcacctggccaaatgtgtatatatttatgcaatatataacatgttttgatacaggcatataatatgtattagtcacatcaggataaagtatctattaccttcagcatttatcctttgtattacaagccaattctacacttcattattttaatgtacaattaaattgttattgactacagggtcattttaattataaaaattatatagaagtataaataaagtccatacattcctgagtcatgaaaaaaaaaa

SEQ ID NO: 1369 - DNA, 3861 bp, Homo sapiens
tttgtctctcgccgcagcctgagctccaggtctccccttcgctgctctgtgtcctctgctcctagaggcccaacatctgtggccctgtgacctgcaggtattgggagacccacagctaagacaccgggaccccctgaaagcctagaaatggacgacttgaaatatggagtgtatcctctcaaggaagcaagtggatgccctggggctgagaggaatcttctagtttactcttattttgaaaaggagacattgacatttagggatgtggccatagaattctctctggaggagtgggaatgcctgaaccctgctcagcagaatttatatatgaatgtgatgttagaaaactacaaaaacctggtcttcttgggtgttgctgtctctaagcaagacccagtcacctgtctggagcaagaaaaagagccctggaatatgaagagacatgagatggtggatgaacccccagctatgtgttcttattttaccaaagacctttggccagagcaagacataaaagattcttttcaacaagtaatactgagaagatatggcaaatgtgaacatgagaatttacagttaagaaaaggctccgcaagtgtagatgagtataaggtgcacaaagaaggttataatgagctaaaccagtgtttgacaactacccagagcaaaatatttccatgtgataaatatgtgaaagtctttcataaatttttaaatgcaaatagacataagacaagacatactggaaagaaacctttcaaatgtaaaaaatgtggcaaatcattttgcatgcttttacacctaagtcaacataaaagaattcatattagagagaattcttaccaatgtgaagaatgtggcaaagcttttaaatggttctcaacccttactagacacaagagaattcatactggagagaaacccttcaaatgtgaagaatgtggcaaagcttttaagcagtcctcaacccttactacacataagataattcatactggggagaaaccatatagatgtgaagaatgtggcaaagccttcaaccggtcctcacaccttactacacataagataattcatactggagagaagccctacaaatgtgaagaatgtggcaaagcttttaaccagtcttcaacccttagtacacataagttcattcatgctggagagaaaccctacaaatgtgaggaatgtgacaaagcttttaatcgattctcataccttactaaacataagataattcatactggagaaaaatcttacaaatgtgaagaatgtggcaaaggctttaattggtcctcaacccttactaaacataaaagaattcatactggagagaaaccctacaaatgtgaagtgtgtggcaaagcctttaatgagtcctcaaaccttactacacataagatgattcatactggagagaaaccctacaaatgtgaagaatgtggcaaagcttttaaccggtccccacaacttactgcacataagataattcatactggagagaaaccttacaaatgtgaagaatgtggcaaagcttttagccagtcatcaatccttactacacataagagaattcacactggagagaaaccctacaaatgtgaagaatgtggcaaagcttttaaccgatcctcaaatcttactaaacataagataattcatacaggagagaaatcttacaaatgtgaagaatgtggtaaagcctttaaccaatcctcaactcttactaaacataggaaaattcatactagacagaaaccctacaactgtgaagaatgtgacaatacatttaaccagtcctcaaaccttattaaacaaaataattcatactggagagaaactctacaaatgtcaagaatgtgggaaagcctttaagcagtcctcaactcttactaagcattaaatattggccgggtgcggtggcttatgcaaaatggctcccagcattttgggaggctgaggtgggtggatcacaaggtcaagagatcgagaccatcctggccaacatggtgaaaccctgtctctactaaaaatacaaaaattatctgggtgtggtggcacgtgcctgtattcccatctactcgggaggcttaggcaggataatcacttgaacctgggaggtggaagttgcagtgagccaagattgtaccactgcactccagtttggcaacagagtgagactccgtctcaaaaaaaatttatactgtacaaaaaccccacaagtgtgaaaaacatggcaaagcctttaagaagccctcaattcttaacagacataagataatttatactggagagaaactctacaaatcagaaagatgtgactacttttgacaacgcctcaaacttttctaaccataaaagtaattatactggtgagaaatcctagaaatctgaagagtgagataaagcctttaaatggttgtcacacttcattgtaggtaagataattcatactggagaaaacgcctacatgtgtgaacaatatggcaaaacttaatgctcacactttattgctaggaaagcatttatacttgagataaattatacaaatataaagactgtgaaaaagccatcattatctgctcacattttactcaacacagagagttcctgcttaataaaagcattataagtgcaattactgtcaaaagatctttcagaaaatataagcttttttagtgaagagtatttattttgaagttgaacatcacaaatataaaaagggttgtagtgcctttacttgtatcacagatctttttgtagacattttcttctagaggaaaactctgaagcagttgatcaaactttgttcaacatcagggaatttatattgaaaaattgtgcaaatataataaatttggaaaaacaatttttcaaaaactacagcttagaaatcaacagttatactagaatatattttttccagatgcagtaaaagtaaaatatttaatccataattaagtctatgcaaatatcagagaatttatggtagaaatatataaggtactgacacttcagatatactaaatcagagtgctaagtatagaaaatctgaaactaaagttggtagaaaagttatttgtatagaactttaagaggatcagaaggttttttgcagagttataattacattcaaagtatactttatttcttgaaaaatattacagattttttgaaaattgaataatgtcatcattcaactctgaaattatttcctgttgtttcttcattcctattggattcacatgtgaaagcatggggttaattgttgctacatcaaagagagagattcttttgtttgtttgttcgtttgttttttgagactgagtttcactctttcgcccaggctggagtgcattggcatgatctcagctcactacaacctctgccttctggtttcaagcaactcttctgcctcagcatcccaagtagctgggataacaggtgccagccaccatgcccagctaatttgtgtatttctagtagagatggggtttcaccatattggccaagctggtcttgaactcctgacctcatgtgatccgcccgcctcagcctcccaaagtgctgggattacaggcttgagccaccacgcccagcctgtagcatattttaataggagaatacaatatataatagtagcagggttaagtaaggcatccatcatctgtagcatttctcctttgttttacaaacaatccaattctacactttaaaaaaaaatttttaaatgtacaattaaatttttatttaccacagtgttatttttatcgtcataataaaaattatatacgagtataaatgaaattcatttctaaattcttaataaatattttctcatgcaaaaaaaaaaaaaaa

SEQ ID NO: 1370 - DNA, 2280 bp, Homo sapiens
gtccatcggggagggcgaaggccctgctctcctcggttcccggctccaggcggcgagctgaggttgggagcctggctttcccctccgagagggttcaggtgcctctgccatagcttctgtcgcctgtgctgtgacccgcactggtcgtgggagtcacctgaaaggcaagaaatgatgtttcaggattcagtggcctttgaggatgtggctgtgaccttcacccaagaggagtgggctttgctggatccttcccagaaaaatctctgtagagatgtgatgcaagaaaccttcaggaacctggcctctatagggaaaaaatggaaaccccagaacatatatgtagagtacgaaaatctaaggagaaacctaagaattgtgggagagagactctttgaaagtaaagaaggtcatcagcatggagaaattttgacccaggttccagatgacatgctgaagaaaacaactactggagtaaaatcatgcgaaagcagtgtgtatggagaagtaggcagtgctcattcatctcttaataggcacatcagagatgacactggacacaaggcatatgagtatcaagaatatggacagaaaccatataaatgtaaatactgtaaaaaacctttcaactgtctctcctctgttcagacacatgaaagggctcatagtggaaggaaactctatgtttgtgaggaatgcggaaaaacatttatttcccattcaaaccttcaaagacacaggataatgcaccgtggagatggaccttataagtgtaaattttgtgggaaagccttgatgtttctcagtttgtatcttatccacaaacgaactcacactggagagaaaccatatcaatgtaaacagtgtggtaaagcctttagtcattctagtagccttcgaatacatgaaagaactcacactggggagaagccttataaatgtaatgaatgtgggaaagcattccatagttccacatgccttcatgctcataaaagaactcacactggggagaagccatatgaatgtaaacagtgtgggaaagccttcagctcttcccattcctttcaaatacatgaaagaactcacacgggggagaagccatatgaatgtaaggaatgtggaaaagcattcaagtgtcccagttctgttcgcagacatgaaagaacccactctaggaaaaaaccctatgaatgtaaacattgtgggaaagtattatcttatcttaccagctttcaaaaccacttgggaatgcacactggagagatatctcataaatgtaagatatgtgggaaagccttttattctcccagttcacttcaaacacatgaaaaaactcacactggagagaaaccctataaatgcaaccaatgtggtaaagcctttaattcttccagttccttccgatatcatgaaagaactcacactggagagaaaccttacgagtgtaagcaatgtgggaaagccttcagatctgcctcactccttcaaacacatggtaggactcacacgggagagaaaccctatgcatgtaaggaatgtggaaaaccatttagtaatttctctttctttcaaatacatgaaaggatgcacagagaagagaagccgtatgaatgtaagggttatgggaaaacattcagtttgcccagtttatttcatagacatgaaaggactcacactggaggaaaaacctatgaatgcaagcagtgtggcagatccttcaactgttcgagctcctttcgatatcatggaaggactcacactggagagaaaccctatgaatgcaagcaatgtggaaaagccttcagatctgcctcacagcttcaaattcatggaaggactcacactggagagaaaccttatgaatgtaagcagtgtgggaaagcctttggatctgcctcacaccttcaaatgcatggaaggactcacactggagagaaaccctatgaatgtaagcagtgtgggaagtcttttggatgtgcctcgcgacttcaaatgcatggaaggactcacactggagagaaaccgtataaatgtaagcaatgtgggaaagcttttggatgtccctcaaaccttcgaaggcatggaaggactcacactggagagaaaccctataaatgtaaccaatgtggtaaagtctttagatgttcttcacaacttcaagtgcatggaagggctcactgcatagacaccccataaccccaggctttaggaggctgaggtggggggactgcttaagcccaggagttcaagaccagcctgggcaacatagtgagactctgttat

SEQ ID NO: 1371 - DNA, 3044 bp, Homo sapiens
gtaatgggcggagcgaatcgcgccgctgacttccggcccggaggctgagggagaatgtttgataggtttatattgtctttttccatcctcttcagacatccttcaaagttgagccctttttttccgctgtgagtctctacacatgtctgacactctcatgtcccacggattacagaaagacattccttgcaggagaacatggcttcccagtgatgtgggaaagatggactctgatctccagggtagaagtggcaaccagagtaagccagttcgttgaagcaaatgatggctgcagtgaagagtaccgaggcacacccatcctcaaacaaggatcccacacagggccagaaatcagccctccagggtaacagccctgactccgaggcctcccgtcagcgcttcaggcagttttgctaccaggaggtaactggcccacatgaagcttttagcaaactctgggaactctgttgtcagtggctgaggccgaagacccactcaaaagaggaaatcctggagctgctggttttggagcagtttctgactatcttgccagaggagatccagacctgggtgagggagcagcatccagaaaacggcgaggaagctgtggctctggttgaggatgtacagagagctcctggacaacagcctggcttgctcctcaggctcccaggaacctgcctcaaaacacaggtctccacgaccaggagacaggtgctgtggtctggacagctgggtcccaggctagagtggtgctattttatcggtagcagcagctccagtgttgttacagggaccagccatgcgtgacaacagagctgtatccctctgtcagcaagaatggatgtgcccaggccctgcacaaagggccctctacaggggtgccacccagaggaaggacagtcacgtctcgctggcaacaggtgtgccctggggctatgaagagaccaagacgctcctggctattcttagtagttctcaattttatggaaaactccagacctgtcagcagaacagccagatctacagggccatggcggaaggactctgggagcagggttttctgcggaccccagaacagtgtcgcaccaagttcaaaagcctacagttgagttaccgcaaagtgaggagaggccgtgtgcctgagccttgtatcttttatgaggaaatgaatgctctttcaggctcctgggcctctgcacctcctatggcaagcgatgctgttcctggccaagaaggaagtgatattgaggctggagagctgaatcaccagaatggggaacccacggaggtagaagatggcactgtggatggtgcagacagggatgaaaaggacttcaggaatcctggccaggaagtcaggaaactagacctgccagtgctgttcccaaacagacttggttttgagttcaagaacgagattaaaaaagaaaatctaaaatgggatgattcagaggaagtagaaataaacaaggctttacagagaaagtccagaggagtttattggcactctgagctacaaaaaggcttggagagtgagccaacatcaagaaggcaatgtagaaattctccaggggagagtgaggagaaaaccccatcccaggagaagatgagtcaccagagtttttgtgccagggacaaagcctgtacacatatcctctgtgggaaaaactgctctcagagtgtgcactctccccacaagccagcgctcaaactggaaaaagtatctcaatgtcctgaatgtgggaaaacctttagccgaagttcttatcttgttcggcatcaaagaatccacacaggcgagaagcctcacaagtgcagtgagtgcgggaagggctttagtgagcgctccaacctcactgcccacctacgaactcacacaggggagaggccctatcagtgtgggcaatgtgggaaaagcttcaaccagagttccagcctcattgtccaccagaggacccataccggggaaaagccttaccagtgcattgtctgtggaaagagattcaacaacagttcccagttcagtgctcaccggcgcatccacactggggagagcccatacaagtgtgcagtgtgtgggaaaatcttcaacaatagctcccacttcagtgcccaccgaaaaacccacactggtgaaaagccttacaggtgttctcactgtgagagaggcttcactaagaactctgccctcacccgtcatcagacagtacacatgaaagcagtactctcatcacaggaaggaagagatgcgttatgagtgtgtcggtaaactgtcagattaagttcctcaggtcagcatgtatgagctttcttctgctgtggagagatctagccagtccctgactttgcaacagacctactgactactggatcttaagacccatgtctaggaccaggagtcagcataaggacgctgacctctcctggctgtgcctgtgactccagagtcctatcttactgtgacttaaagtttgatggagagaaagctgtaggatccataaattctaccaggaaaccagggtcttcctgttcctagcactgagaatgggcacccagtggtccaagaacactttctgggctaacatagtcctcacacagggctgagaaagaaagtgtctcctttcctggaaagcacatgtaaaagttaagggcctgaatctcttctaaaccaataattgacctctaggcacccaccgtaatactgctaccttcagggcagaagacactgctctttgtaacccagccaccaccaaaaagcaaacagaaagaaggaaggatggttaagccattggataatactgaatctgtttccctaagtgacttaaccttagagcaagcacaacatccaggttaattttttgtaagatttctccttttattattgccctcatcatagttcctgattgtctcttaaagtaagtggtttatagacattactatttctgataataatttacaaactactataaacaaatttataaacattactaatttctgatgaaaataaagttgtttctccctccaaaaaaaaaaaaaaaaaa

SEQ ID NO: 1372 - DNA, 1290 bp, Homo sapiens
gagtctagtctttgttcggggctgtccaaaggacgctagctgttgcacctgttcctccctgcgcgtaagatagaggataaatctcctggcaaagcccagaatgaccacagccctggaacctgaggaccaaaaaggacttctgataattaaggcagaggaccattactggggacaggattccagctcacaaaagtgcagtcctcacaggagggaactctatagacaacacttcaggaagctctgctatcaggatgcacctggaccccgtgaagctcttacccagctgtgggagctctgccgtcagtggctgaggccagaatgccacaccaaggagcagattttagacctgctggtgctagaacagttcctgagcattcttcctaaagacctgcaagcatgggtgcgtgcacaccatccagagactggagaggaggcagtgacggtactggaggatctggagagagagcttgatgaacctggaaagcaggtcccaggcaattcagaaagacgggacatactcatggacaagttggcccccttgggaaggccatatgaatcactgactgtccagctccatcccaaaaagacccagctggagcaggaagctgggaaaccacaaaggaatggtgataaaactaggactaagaatgaagagttgttccagaaggaagatatgcccaaagacaaggaattccttggggagataaatgacagactgaacaaagatactcctcagcatcctaagtccaaagatattattgaaaatgagggcagatcagaatggcaacagagggaaagaagacgatataaatgtgatgaatgtgggaaaagtttcagtcatagctcagaccttagtaaacacaggagaactcacacgggagagaagccctataaatgtgatgagtgtggaaaagccttcattcagcgctcacatctcattggacatcatagagtacacacgggagtaaaaccctataaatgtaaagaatgtgggaaagacttcagtgggcgcacaggtcttattcagcatcagagaatccacacaggtgaaaaaccctatgaatgtgatgagtgtggaaggcctttccgagtaagttcagctcttattagacatcaaagaattcataccgcaaataaactctactaatatagcagtaatatcaaaagttctttggacactcaggcctaactagttatcaaagaatctattttagaaaccttgagtttcctcaatgtggtcaaagcttcagtcatcattaaacttctctggaccaaaaaaaaaaaaaaaaa

SEQ ID NO: 1373 - DNA, 4315 bp, Homo sapiens
gccggaaaggacccggcctcgagatggcagagcggaggcgttccctgggctgagctgagcacctcctccctgagacagcagcggtctaacccccggcgcgggagggacccagccagggggctgtcctagtagattccggcattgcctccaccccgctgtggcggagacgcagagggcgggtcgcgctcgagggtcagggaggagagtgacccggccctggtccagggccctccctgcccgccttggggccagaactccagccctggggagtgggcagggcctgttttccgtgcctcacgccctgcttttcgcctccttcagcgctgtctgctagctgcttttcctgctctctctccctggaggcgaacccttgtgctcgagatggcagccaccctgctcatggctgggtcccaggcacctgtgacgtttgaagatatggccatgtatctcacccgggaagaatggagacctctggacgctgcacagagggacctttaccgggatgttatgcaggagaattatggaaatgttgtctcactagattttgagatcaggagtgagaacgaggtaaatcccaagcaagagattagtgaagatgtacaatttgggactacatctgaaagacctgctgagaatgctgaggaaaatcctgaaagtgaagagggctttgaaagcggagataggtcagaaagacaatggggagatttaacagcagaagagtgggtaagctatcctctccaaccagtcactgatctacttgtccacaaagaagtccacacaggcatccgctatcatatatgttctcattgtggaaaggccttcagtcagatctcagaccttaatcgacatcagaagacccacactggagacagaccctataaatgttatgaatgtggaaaaggcttcagtcgcagctcacaccttattcagcatcaaagaacacatactggggagaggccttatgactgtaacgagtgtgggaaaagttttggaagaagttctcacctgattcagcatcagacaatccacactggagagaagcctcacaaatgtaatgagtgtggaaaaagtttctgccgtctctctcacctaatccaacaccaaaggacccacagtggtgagaaaccctatgagtgtgaggagtgtgggaaaagcttcagccggagctctcacctagctcagcaccagaggacccacacgggtgagaaaccttatgaatgtaacgaatgtggccgaggcttcagtgagagatctgatctcatcaaacactatcgagtccacacaggggagaggccctacaagtgtgatgagtgtgggaagaatttcagtcagaactccgaccttgtgcgtcatcgcagagcccacacgggagagaagccataccactgtaacgaatgtggggaaaatttcagccgcatctcacacttggttcagcaccagagaactcacactggagagaagccatatgaatgcaatgcttgtgggaaaagcttcagccggagctctcatctcatcacacaccagaaaattcacactggagagaagccttatgagtgtaatgagtgttggcgaagctttggtgaaaggtcagatctaattaaacatcagagaacccacacaggggagaagccctacgagtgtgtgcagtgtgggaaaggtttcacccagagctccaacctcatcacacatcaaagagttcacacgggagagaaaccttatgaatgtaccgaatgtgagaagagtttcagcaggagctcagctcttattaaacataagagagttcatacggactaagctgtaattatgatggctgagaaatgattcatttgaagatacaattttatttgatatcaatgaacgccctcaagactgagctgcttttatcatactctcctagttgtgggccacgatttaaaccatcagagatgacaagccatttgaaattctgaccctcagctttgggaatgttatctcctccaaaatggtgatttttattcactcaatgggttacttcattaaaagcagccccacaagtaactggaaatctgaagaccaggggacaaatgctggtgaatgcttaggcctggaaatggagtaaatctttcaatgttattttctcccatccttggcccaaggaactatgctaagtgaaacgtgggactgtaatagggtggtaatggctgctttggaaaaaggcaactagagactctgcctaaattgccacacctattcacacaccatagtagttgggcacacacatcttcccttccaaagggctttttccttgagttgctcatgcatttgtatcttttccatcttcctgagggcaagattttgcacgatgaaggcaatgattgtaacttttctccttctcattgtttctaattagctcctttaaagcttgcatctttgtgaaggctaactgaagatacggttggaaaggaaaaatgagacacaggtttggggaccaaggacccatcaatgatggtgactttagcagaagatgcccacagttattactgccattaatcagatttatgaattttctttggggatcactatagggaatattgtatagaaaatatcttcaagaaaagataggaccatcagtgacagttaagtgtaaggagcaagtggaattgagtccttcagggaaggaaccacagagtcccttcccaaggaatgtaggtcgtttctgtgttctttcccttctaatctttaagatcaactcttcctatcctgctaactctaagatttgataagggccacatcccagtgtttatcttagcttgcatcagggcatgtgtatgtacagtaatgtgtattcctgtggtttttctaatagaaactgaatttacagagacttagcatgttcttgggtgatgtgagtcatgtgacagaagtacagacataactccaatgtgagaaatgtccttttttcattatggaaaataatttaaacactagtgctttagtgtgcactctcctgtaaggtctgtctttgtacagagctaagcacttgtttgtatgtgtttgtcaattgtggaagataatgaccagacaaataggtcgattgtcctattctcagaatgaattatcttctatggtaatgaagaactctttggcttagtcagaaggaattaacgaacctcggtaggaatgtatttccatcctcccaccctacagatataagaggttaaaataacagttcgcccaatttaagcccagtagtgtcagttttcctaatctcagtccaggtaggaattaagaaatatctcaagtgttgatgctatccaagcatgttggggtggaagggaattggtgcccagaaaatgggactggagtgaggaatatcttttcttttgagagtacccccagtttatttctactgtgctttattgctactgttctttattgtgaatgttgtaacattttaaaaatgttttgccatagctttttaggacttggtgttaaaggagccagtggtctctctgggtgggtactataatgagttattgtgacccacagctgtgtgggaccacatcacttgttaataacacaacctttaaagtaacccatcttccaggggggttccttcatgttgccactcctttttaaggacaaactcaggcaaggagcatgtttttttgttatttacaaaatctagcagactgtgggtatccatattttaattgtcgggtgacacatgttcttggtaactaaactcaaatatgtcttttctcatatatgttgctgatggttttaataaatgtcaaagttctcctgttgcttctgtgagccactatgggtatcagcttgggagtggccatagatgaccgcatttccatgacctaactgtatttcacccccttttccttccctactgttcttgccccaccccaaccagttcctgctgctgcttttggcttcttggaggtgaagggcttaaaacaaggcttctaagcacccagctatctccatacatgaacaatctagctgggaaacttaagggacaagggccacaccagctgtctcctctttctgccaattgttgcccgtttgctgtgttgaactttgtatagaactcatgcatcagactcccttcactaatgctttttgcatgccttctgctcccaagtccctggctgcctctgcacatcccgtgaacactttgtgcctgttttctatggttgtggagaattaatgaacaaatcaatatgtagaacagttttccttatggtattggtcacagttatcctagtgtttgtattattctaacaatattctataattaaaaatataatttttaaagtca

SEQ ID NO: 1374 - DNA, 1012 bp, Homo sapiens
catgaaggaactcacactctagagaaaccctatgaatgtaagcaatgtgggaaattgttatctcatcgctcaagctttcgaagacacatgatggcacacactggagatggccctcataaatgcacagtatgtgggaaagcctttgattctcctagtgtatttcaaagacatgaaaggactcacactggagagaaaccctatgaatgcaagcaatgtgggaaagccttccgtacttccagttcccttcgaaaacatgaaacaacacacactggagagcaaccctataaatgtaaatgtggaaaagcttttagtgatttattttcctttcaaagtcatgaaacaacacacagtgaagaggagccttatgaatgtaaggagtgtgggaaagcatttagttcttttaaatacttttgtcgccatgaaaggactcacagtgaagaaaaatcttatgagtgtcaaatttgtgcaaagccttcagtcgtttcagttacttaaaaactcatgaaagactcacacggcagagaagccatatgaatgtaagcaatgcaggaaagcattcttttggccctctttccttctaagacatgaaaggactcacactggagaaagaccctatgaatgtaaacactgtggtaaagccttcagtcgttccagtttctgtcgagaacactgaaagaactcacatgagagaagccctatgaatgtaaggaatgtgggaaagccttcagttctctcagttcctttaatagacataaaaggacacactggaagatattctataagtgtatgaatgtgggaaagcattcattggttttatcacattcagatacttgaaagaaataaatcctgtgaatgtaaacgtggtaaagccttaagaagtttccaggctgggcgcagcggctcacacctgtaatcccagcactttgagaggccgaggagggcagatcacgaggccaggagatcgagaccagcctggctaacatgggaaaccctgtctctactaaaaatacgg

SEQ ID NO: 1375 - DNA, 4181 bp, Homo sapiens
agtgctgcgccgacagcggtcaggatctcggctttcttgcttcgagagggactaggtgcctccaccagagcttctgtcgctctgtaacctgcactgtgacctacactagtcgcgggagccacgcagaggacgccggaacaccctggaagccgagaaatggacccagtggcttttaaggatgtggctgtgaacttcacccaggaggagtgggctttgctggatatttcccagaggaaactctacagggaagtgatgctggaaactttcaggaacctgacctctttaggaaaaaggtggaaagaccagaacattgaatatgagcaccaaaaccccaggagaaacttcaggagtctcatagaagaaaaagtcaatgaaattaaagatgacagtcattgtggagaaacttttaccccagttccagatgacagactgaacttccaggagaagaaagcttctcctgaagtaaaatcatgtgaaagctttgtgtgtggagaagttggcctaggtaactcatcttttaatatgaacatcagaggtgacattggacacaaggcatatgagtatcaggaatatggaccaaagccatgtaagtgtcaacaacctaaaaaagccttcagataccgcccctcctttagaacacaagaaagggatcacactggagagaaacccaatgcttgtaaagtatgtggaaaaacctttatttcccattcaagtgttcgaagacacatggtaatgcacagtggggatggaccttataaatgtaagttttgtgggaaagcattccattgtctcagattatatcttatccatgaaagaattcacactggagagaaaccatgtgaatgtaaacagtgtggtaaatcctttagttattctgctacccatcgaatacataaaagaactcacactggagaaaagccttatgaatatcaggagtgtgggaaagcatttcatagtcccagatcctatcgtagacatgaaaggattcacatgggagaaaaggcttatcaatgtaaggaatgtggaaaagcattcacgtgtccccgttatgttcgtatacatgaaaggacccactctaggaaaaatctctatgaatgtaagcagtgtgggaaagcattatcctctcttacaagttttcaaacacacgtaagattgcactctggagaaagaccttatgaatgtaagatatgtggaaaagacttttgttctgtgaattcatttcaaagacatgaaaaaattcacagtggagagaaaccctataaatgtaagcagtgtggtaaagccttccctcattccagttcccttcgatatcatgaaaggactcacactggagagaaaccctatgagtgtaagcaatgtgggaaagccttcagatctgcctcacaccttcgagtgcatggtaggactcacactggagagaaaccgtatgaatgtaaggaatgtgggaaagccttcagatatgtgaataaccttcaaagtcatgaaaggacacaaacacacataagaatacactctggagaaagacgttataaatgtaagatatgtgggaaaggcttttattgtcccaaatcatttcaaagacatgaaaaaactcacactggagagaaactctatgaatgcaagcaacgttcagtagttccttcagtagttccagttccttttgatatcatgaaaggactcacactggagagaagccctataaatgcgagcaatgtgggaaagccttcagagctgtgtcaatcctttgaatgcatggtaggactcaccctgaagagaaaccctatgagtgtgagcaatgacggaaagccttcagatctgccccacacctttgaatacgtggtaggacacacaatggagagaagccctatgcatgtaaggaatgtgggaaacccttcggatctgcccagaaccttcgaattcatgaaaggacacaaacacacataatgcactctgtagagagaccttataaatgtaagatatgtgggaggggcttttattctgccaagtcatttcaaatacatgaaaaatcttacactggagagaaaccctatgagtgtaagcaatgtgggaaagcctttgtttccttcacttcctttcgatatcatgaaaggactcacactggagagaacccctatgagtgtaagcaatttgggaaagccttcagatctgtcaaaaatcttcgatttcataaaaggacacacactggagagaaaccctgtgaatgtaagaaatgtagaaaagcattccataatttctcttctttgcaaatacatgaaaggatgcacagaggagagaagctctgtgaatgtaagcattgtgggaaagcattcatatctgccaagatcctttgaatacatgcaagaacacacaatggagagaaaccctatgaatgtaaagaatgcagaaaagcattcagcttgcctacttcctttcatagacatgaaaagactcacactggaaggaaacactatgaatgcaagcaatgtggcaaagctttcacttcttccagttcttttcaatatcatgaaagaacacactagggagaaaccctatcaatgtaagcaatgtgcaaaagcctttatttcttccacttcttttcaatatcatgaaaggactcacatgggagagaaaccctatgagtgtatgccaagtgggaaagccttcatttcttctagttcccttcaatatcatgaaaggactcacactggagagaagccctatgaatataagcaatgtgggaaagccttcagatcagcctcgcaccttcaaatgcatggaaggactcacactggagaaaaaccctatgaatgtaagcagtatgggaaagcgttcagacctgacaagattctttgaatacagataatgaatgtaaacaattaactgtttataataactgtatactaacaaatgatattctttttaaataagaagctataatatcccattggtgtcatgtattagatcagccttatactgttaaattgttattatttggacattgtgagtcagtataaccatgtggataaaatgccagacatctttttattcgaaaattttacttttcatgcttctgtacttacatttttatctcaaccttaatttttctttctttttttttttcccccagaaagaatctcactctgtcacccaggctggagtgcagtggcatgatctcaggtcactgcaacctctgcctccagggttcaagcaattctcctgcctcagtctcctgagtagctgggactacaggcatgcgccaccatgccaggctaattttttgtattttttagtagagacggggtttcaccatattggctaggctggtctcaaactccagacctcatgatttacccacctcggcctcccaaaatgctgggattacagacatgaaccatcatgcccagctgcaaccctaatttttcattcagtcataataccaatagttatctcatgcacctctgagtgccttcttccccaaaaccagcagtgccatacctgctgtcagcaagggtgtaatataccatagtgataaatatgaccaaaagccataaatgactgtgagatgtatgagaattacaagtcacattagtaagaagagaaaaattttggtcatgtttatgatttgaaatacgttttcctctatcacatttaaaaatatagttacaaaatgcccttgtttttgtcctgattcatcatggtcactgaggagcatcgtctcatatgcctggtatgtgacacgtgtctctccaacaataaaagacttggccttggctgggcatggtggctcacgcctgtaatcccagcactttgggaggccgaggtcaggagttagagaccattctgaccaatatgatcaaaccccgtctctactaaaaatacaaaagttagcagggcgtggtggcatgctcctgtaatcctagctattcaggaggctgacataggagaattgcttgaatataggaagcagaggttgcagtgagccgaggttgcaccattgtactccagcctgggcaacaagagtgaaactctgtcttaaaaaacacaaaaaaagacttggccttagggccgagtgcggtggctcacgcctataatcccagcactttgggaggccgaggcgggcggatcactaggtcaggaaatggagaccatcctggccaacacagtgaaacccagtctctact

SEQ ID NO: 1376 - DNA, 2736 bp, Homo sapiens
aactgtcaatcaggcactgcccagagaagtgtgtgtggttgaaaaagcccgcggcgtctgctccacccacctgcgctcggctctgggttctgtagctgagagacgacctggaagttctgaggcagcctttgtctggctggaacacgcattggcagcgggagctgtcggtaggacctgggacaccgcggaagtcgggaaatggcctcagtggctttagaggatgtggctgtgaacttcacccgagaagagtgggctttgctgggtccttgtcagaagaatctctacaaagatgtgatgcaggaaaccatcaggaacctggattgtgtagtaatgaaatggaaagaccagaacattgaagatcaatatagatatcccaggaaaaatctaagatgtcgtatgttagagagatttgttgaaagtaaagatggaactcaatgtggagaaacatctagccagattcaagatagtattgtgaccaagaacactcttcctggagtaggtccttgtgaaagcagtatgagaggagaaaaagtcatgggtcattcatcccttaattgttacatcagagttggtgctgggcacaaaccacatgagtatcatgaatgtggagagaagccagatacgcataaacaacgtgggaaagccttcagttaccacaactcatttcaaacacatgagaggcttcacactggaaagaaaccatatgattgtaaagaatgtgggaagtccttcagttctttgggaaaccttcaaagacacatggcagtgcagcgtggagatggaccttataaatgtaagttgtgtgggaaagcgtttttttggcccagtttattacatatgcatgaaagaacgcacactggagagaaaccatatgaatgtaagcagtgttctaaagccttttctttttacagttcctatctaagacatgaaagaacacatactggggagaaaccgtatgaatgtaaacagtgttctaaagcctttcctttttacagttcctatctaagacatgaaagaacacatactggggagaaaccatataaatgtaagcagtgttctaaagccttccctgattccagttcttgtctaatacatgaaagaactcacactggagagaaaccctatacatgtaaacaatgtgggaaagccttcagtgtttccggttcccttcaaagacatgaaaccactcacagtgcagagaaaccctatgcatgtcagcaatgtgggaaagcgtttcatcatctgggaagctttcaaagacacatgataaggcacactggaaatggacctcataaatgtaagatatgtgggaaaggctttgattgtcctagttcactgcaaagtcatgaaagaactcacactggagagaaaccctatgaatgcaagcagtgtgggaaagcattatctcatcgctcaagctttcgaagtcatatgataatgcacactggagatggacctcataaatgcaaggtatgtgggaaagcctttgtttatcccagtgtatttcaaagacatgaaaggactcacactgcagagaaaccctataaatgtaaacaatgtggcaaagcctaccgtatttccagttcccttcgaaggcatgaaacaactcatactggagagaaaccctataaatgcaaacttgggaaagcctttattgatttctgttcctttcaaaatcacaaaacaactcacactggagagaagccatatgagtgtaaggaatgtgggaaagcattcagtcgtttcagatacctttctcgacataaaaggactcacacaggagagaaaccttatgagtgtaaaacatgtaggaaagccttcggtcattatgataacttaaaggtacatgaaagaattcactctggagagaagccgtatgaatgtaaggaatgtgggaaagcattctcttggctcacttgctttctacgacatgaaagaattcacatgagagagaaatcctatgaatgtccacaatgtggtaaagccttcactcattcccgttttcttcaaggacatgaaaaaactcatactggagagaacccgtatgaatgtaaggaatgtgggaaagcatttgcttctctcagttccttgcatagacataaaaagactcactggaaaaaaactcacactggagagaacccatatgaatgtaaggaatgtgggaaagcatttgcttctctcagttccttgcatagacataaaaagactcactagcattctctctaaatgtatggaatgtgggaaagcatttattaattttatttcatttcagatacttgtacgaaacacattggagatagaccctgtgaatgtaagcacttggtaaagccttaagtagtttcagtttctttccagtacagtcatcccttgatacctgctgggtattggttccagcactccgtgagccatgtccagtcccttttataaaatgacatgtttgtatgtaacttacccacatcctcttgtatagtctcaattatgtctagattacttaaaatacctcatgcattataaaagctatgcaaatagttgttctattgtattgtttagggaatcatgataaggaaaagagtctatgtattttcagtatagatgcagtaattgtgagcctatcaacatagtgtagtcagccagaacattaaagtttctttgtttcaactctcaaaaaaaaaaaaaaaaaaaaaaaaaaaaaaaaaaaaaaaaaaaaaaaaaaaaaaaaaaaaaaaaaaaaaaaaa

SEQ ID NO: 1377 - DNA, 10264 bp, Homo sapiens
ggagccgccgggaggtaggcgcgggacgggcggctgcggtggcggcgggtggaccgattgtcgctcggcggcgggagtcggtggagtctcgctctttcgcaaggctggagtgcaatggcatgatctcggctcactgcagcctccgcctcctgggttcaagtgattcttctgcctcagcctcccgagtagctgggactacagaaatgctggtaatttcagtcacttgctgatgacttctgatgtcccagcaaatgttggcattgttgactgctgagaagatacttctgaggacccacgtctaaggtggacttggttcgcactcttctggttagtccctgaacaggagtgatgcctccaggcaggtggcatgctgcctatccagctcaggcccagtcttcgagggagcgagggcggcttcagacagtaaagaaggaagaagaggatgaaagctatactccagtgcaggctgccaggccacagactctcaaccgccctggccaggagctgttccgccagctcttcagacagcttcgctaccatgagtcttcagggcccctagaaactctgagccggctccgggaactctgtcgctggtggctgaggcctgacgttctctccaaggcacagatcctagagctgctggtgctggaacagttcctgagcatcctgcctggggagctccgggtttgggtgcagcttcataaccctgagagtggcgaggaggctgtggccttgctggaggagctgcagagggaccttgatgggacatcctggagggacccgggccctgcccagagcccagatgtgcattggatgggtacaggagccctgcgatctgcacagatatggtcccttgcttcacctctcaggagcagctctgctctgggggaccacctggagcctccctatgaaatagaagcacgtgacttcctggctgggcaatccgatactcctgctgcccagatgcctgcccttttcccgagagaggggtgcccgggagaccaggtaacaccaaccaggtccctgacagcccagctccaggagaccatgactttcaaggatgtggaggtgaccttctcccaggacgagtgggggtggctggactctgctcagaggaacctgtacagggatgtgatgctggagaattataggaacatggcttccctggtgggaccattcaccaaacctgctctgatctcctggttggaagcaagggagccatggggcctgaacatgcaggcagctcagcctaaggggaatccagttgctgctcctacaggagatgacctccagagtaaaacaaacaaattcatcttaaatcaggaacctttggaagaagcagaaaccttagctgtgtcatcaggatgtcctgcgacaagtgtttctgagggaattgggctcagagaatcttttcaacagaagagcaggcagaaggatcaatgtgaaaatcccatacaagtaagagttaagaaagaagagaccaatttcagtcacaggacaggaaaagactctgaagtatcaggaagtaatagtcttgacttaaaacatgttacatatttgagagtttctggaagaaaggaatcccttaaacatggctgtggcaaacacttcagaatgagttcacaccactatgactacaagaaatatgggaaggggctcagacacatgattgggggcttcagcctacatcagagaattcatagtggactgaaagggaacaaaaaggacgtgtgtggaaaagacttcagccttagctctcatcaccaacgtgggcagagtcttcacacagtgggagtgtcatttaagtgcagtgactgtggaaggactttcagtcatagctcccatcttgcgtatcatcagagacttcacactcaagagaaagcatttaaatgtagggtgtgtgggaaagccttccggtggagttccaactgtgcgcggcatgagaaaattcacactggagtgaagccttataaatgcgatttatgtgagaaagctttccgacgcctgtcagcctaccgtctgcaccgagaaacccatgctaagaagaaatttcttgaattgaatcagtatagggcagctctcacctacagctcagggtttgatcatcatttgggagaccaaagtggggagaaactctttgactgcagccagtgcaggaaatccttccactgtaagtcatatgttcttgaacatcaaaggattcacacccaggagaagccctataaatgtaccaaatgtaggaaaacctttagatggagatcaaactttactcgtcatatgaggttgcatgaggaggaaaaattctacaaacaagatgaatgtcgtgaaggcttcaggcaatctcctgactgcagtcagccccagggtgctcccgctgtggagaaaacatttctgtgtcagcagtgtgggaaaacttttactagaaagaaaactctcgttgaccaccagagaattcacacaggtgagaaaccttaccagtgtagcgattgtgggaaggactttgcctataggtcagcctttattgttcataagaagaagcatgccatgaaaagaaaacctgagggcgggccatcttttagtcaggacacagtgttccaggttcctcagagcagtcactccaaagaggagccctacaaatgcagccagtgtggcaaggccttccgcaatcactcattcctcctcatccatcagagagttcacactggagagaagccatataagtgcagggagtgtgggaaagccttcagatggagttccaatctctaccgacatcagaggattcactctcttcaaaaacagtatgattgccatgaaagtgaaaagactccaaatgtggagccaaaaatcctcactggtgagaaacgtttttggtgtcaagaatgtgggaaaacctttacacgtaaaagaacccttttagatcataagggaatacacagtggagagaagcgctataaatgtaatctatgtgggaaatcttatgatagaaactatcgccttgttaaccatcagaggatccactctacagagagacctttcaaatgtcagtggtgtgggaaagagttcattgggagacataccctttccagtcaccagaggaaacacaccagagcagcacaggctgaacgtagcccgcctgcacggtcttcctctcaggacacaaagttgagattacagaagctaaaaccaagtgaagagatgcccctcgaagactgcaaagaagcttgcagccagagctccaggctcactggactccaggacataagcattgggaaaaagtgccacaaatgcagcatatgtgggaaaacttttaacaagagttcacaactcattagccacaagagatttcatactcgagagaggcccttcaaatgcagcaagtgtggaaagaccttcaggtggtcttcgaacctggctcggcatatgaaaaaccatattagagattagcctgggacctgacagtgacagtgggggtgggttctcagtcccctgctagagaacccttaattataggcattgtggagtaactttgataaagggcccagccctttctgttttggaagctagtgacagaatcccaaggatttgaaagctcggggagtccccagcctgcctgctaggatgtgacgctggggaagtgcagcaccatgtcctttggagcccttctggagactccggcccctaggagtggcctctgcaccatagcctgcggctcccctattcaggtctccttccacaactctgaagagagagaccactgccctttgtggttggacagaatatctgtggcatcatgggctatggctgctggaaaggggccagtgggatcctagatttgtcttcaagtttggcctgtggccatgcctattctgttgactttaaaagcagcagcatcaagaactcctagccttcccaaatgccccctggggagttctggctggggcttcagccttcctggctggcttttggatatctgctagggggttagagtggtctcagcggcaggtggaggagagcaggatgctgggctcaagcgcttggcgtgtggatctctaccagtaccctgttgccatccccatcccacaggcctgcataggcagcagcggtccatctgtttaacagaaatgtgctgagcactcccatacaccaggcgctggtgtgtttgccagagacccagcagggaccagaacagatgaaaatcctgccatcttggatctttacagatgacaaacaaatgggatacgcagtattctggatggtgatgtgtgtagtggacaaagtgaatcagagaagagcagagggagtgctggattgggagatcagtcgtgattttagatagtctggtcagggagggcctcaactgagaaggtgaaatgtgagcaaagacgtgaaggaagccagggaggtagcaggtagctctctagggagagttgcaggcagaggagattgggtcttgactggtgtcctcaggaaggaagcccctgggatggagtgcagggagccagctggaagggaaggagaggggccagggaggccacaggcccggccatatgagcatcatgggtcattacgggggcttgagctggctcagagggaggcagggagcttttggacaattttgagttgaggagtgatgtggtttgaatctgaattatattttataagggttaaccacagatccaaggactcagtaaaagggtgaaaggcttctcatgcagttagccttgctgccagttcccataaatcagactcctccccactccgtttctgaattttctataggatcctcggcctcagcagatataaacgcttaccattgttgtgttcatgtctctagcccctgcacactgcaggcccctctcagcttcacatacccctctccatgtatgagatctggtgctagcaatcagattcaacccgaaggaacaagtgcatgtgcctgctgctctcaggagaaaaggcagcctgttctgggaggagctccctcactggcccacccacttgtgttgaagcaaaaagcaagaatcaattacttaaaggcaaaggagtgatattgctaaagcatgtgagtaatcattgcttctgattattgaagaggtcagattatgaatgaaaggataaaatgttttaatagtagagcagtgtcctgactataggggcccgttcatggagctggtcatttcttgaaatgagaagaaaccaacctggaagatgtctttttcagtagagtatggaataatcttacctgctctggattgccatgagcaggtgaaaatgaaggctctgatattgtgtggtggtgtcacaggatggtgggggcggggcagaagtctcctgttggtgttctgatgcctgttcagctttgtcctcaggaaggtttggtcatcttggttctgccatcctcttgccttcctacggcagcagctgttcatggcactgaagatgtcccttcactgtcccaaaactggcactagaagtggctgggcaggggggccagagtcataggaagggtcttggagtcatcagatctgggttccaggcatggtgtgccttttcttggcaggattgatcttgagcaagtcaatgaacctctgcatcaatttccttatgtgtgaagttagagtgcttggctgtgctacctgattcctgagattggtgaaagagggcttggtttaccaaggctctccatcaggtggttgacctctaggaccagggccctctcagaggtgcagcttccatgtcagttggtgttgtaaccatggaaaagtccctttccaatcaaacttttagcacccctttccccccatctctgctccctttgccacaggataccttgtaaagttcctgccccagtatagggatatttttactgtcttttttattttttgagacagggttgcccagggtggagtgcagtggcaggatcacagcttactgcagccttgacctcccaggctcaggtcccatctgagcctcccgagtagctggggctacaggtgtgtgccaccctgccagctaattttttatatttttttgtagagacaaaacttttatttttttttcccatgttgctcatgctggtctcaaactcctgggctcaagcaatccacccacctctgcctcccaaagtgctgggattacaggcgtgagccactgtgcctgacctgtcatttttatagaatgaaatgtgcttatttctaaacattctaatcaaattttaaaatgtgcaaagaatgaagtgaaaaactgaatttttttttttttttgatacggagtctcactctgttacccaggctagagtgcagtggcgcgatctccgctcactgcaagctctgcctcctgggctcacaccattctcctgcctcagcctcctcagtagctgggactacaagtgcctgccaccacgcctgggttattttttatatttttagtagagacggggtttcactgtgttagccaggatggtctcgatctccaggatggtctcgatctccaggatggtctcgatctcctgacgtcgtgatccacccgcctcggcctcccaaaatgctgggattacaggtgtgagccactgtgcccggccaaaagaacagaaattattttatcctgaagtaagctgtttatatttgggattatactgaacctatttgtccaataacctgagttttcaaataattttagttctataagtactataattatataaatattaatgaattcagattagctgaaaggaaaaaaagtagaagcctgactacttggtgctaactactaaagattttggcagaatcaatgttggatttggctttcctgtcccttccccatgccagccccccagagtgttctgccttgtgctgcctcccttcacctggagtgccacacccctctctctgccagttcagctcttcattcttcaaggcctgaccttgtctgacccttgtgcctctaaacccgtggccccacctctcttggttcctatgtcaggtgatgtttgtgtttttggttatgcccatctccatagccagaccaagcactctggaagccagggttgggtgcttatttatctgtttgccatgcagaaaatatcttgcacaaaattacctctgttaaggaatctgaagctgaatttagtttggctgagtcagggttgggttttttttaaggggctgtggggtgaaatgttgactggaagccacccacaaacacacacctgctggttaggaacccggctgtgggtggttctgagctgtttggcttcagttgacagtttctgattgccctgagcaccaggtctcatcttgcatctcatcctggcctggagaacattcagtttccttccaacccttcccacctttcccccactcccttggaggaactgaagttggggttgaggagagccagatggctggagtgggtatttgaaggtctttctgtcacctgttcagtgtggtctgccccacccctgctgaccaagactgactgaaatgtaaaataatacagaccatctcacactcagaaagctggcacatttttgaaagcccaagtgtgggtaagtgcgtggaacaacgataattcacactgctttatgagtagaaattgtgagaaatattgtgccaggcaatttgcaaaatcttggaaggttgtgtgcacttaaccacccagcaactactcctggatgcatcctagagaagtgccatgtgaacagagaatgattttaagacttcactgaagtattgtttaggtagcaagattgggaaaagcctgcatttcatcagcagaagaatggataaataaatgggttgtttttggtccttggaaagtgaatatgaaagagttacgtctcaacacagatagatgaaaaattatgctgagaaagttggtgaagctacatacaaggtacccttagtgtaaagttaagcatactgtgtacctgtgggcacgttacttcaacttgtttttcactttttctgtaaaatgggatagtagtggcaatctcacagggtgattgtgggtgggggggtggtcaatgaagtaatgcatgtaaaatgcttagaatagtgtctagcatgtaagccttgtggacatatagaaagtgttattgttttgcacagtaatctattttctgtggattcaaataatatgaaatgagtataaaatcatgtattggaacgatgtgtgcaagtcaccattctgccttcctaaggcaggagacctgatggatttggggagggtacatggggccttcagttgtgttttctttgtttttttctaaaaattgatgcagaggcatcacaatgttaagatttttacagggtagtgtggtgggtactttttaactgtttgcttaaagtgtttcaaagtaaaaatatttcttaagcatagtctctgacatcttatgactttatagaaatccctgccaggtacatgatgttacttagagtgagccacctaatctttcaaggcttccatttcctcacctgcaaaaattgggagtgtcagaggcgtttgaaccagagtgactccatcttgaatagggaactgggtaaaataaggctgagacctactgggctgcattcccaggaggttaggcattccaagtcatgggatgagataggaggtcagcacaagatacagtcataaagaccttgccaataaaacagcatgtggtaaagaagccggtcaaaaccaagatggcaatgaaagtgacctctggttgtcctcactgctgtaattatactgtaattataatgcattagcatgctaacagacactcccaccagtgccatgacagtttacaaacgccatggcaggcctggcacgatggctcatgcctgtaatcccagcactttgggaggccaaggcgggcggattatgaggtcaggagattgagaccagcctggccaacatggtgaaaccctgtctctactaaaaaatacaaaaattagctgggcatggtggcacgtgcctgtaatcccagctacttgagaggctgaggcaggagaatctctagatcccgggagttggaggttgcagtgagccaagatggtgccactgcactccagcctgggtgacagagcaagactctgtctcaaaaaaaaaaaaaaaaaatgccatggcaacatcaggaagtaacactatatggtctaaaaaggagaggaaccctcagttctggtaattgctcacacctttcccgggaaacttatgaataatctaccccttgtttagcatataatcaataaataaccataaaaataggcaaccagcagcccttggggctactcttcctatggagtagccattctgtatttctttactttcttaatattaactactttcactttgtggactcgcccgaattcttttcttgagcaaggtccaagaactctctcttggggactggatcacgaccgctttctggtaacaggagcaatacaaatggctattagtaaacgaacgcttaagtaactctagtacatctatgatgaaataccaggccacagtttttttaaaaatgaggatgttctctatatactgacgcacagtcaccaagacatgcactttataggaaattataagctcctccttgcctaaatctccttaattttgcttaataaataacaagtgaagccagaagctgtaaactcataattttaatgaagaaatgggatccagaagatggagatgtttttcattctactttattagatgaggaaaaggagagtaaatacttgtatgccagctaccacaccttttaaagttaatgttaaccctgctaagaacagcaaggagattttatatcagccaggttttagttgccagaaaccacaccagttattttagcaaagaccttataaagaagtgtactatatttaagtagctaaaaaggcaagaagaaaatgccaaggtgtcttggaggtagcaactgctaagcagctgccaccccaggactgggggagctagaatagagtctccccatgtttgacgtttgtctgctaatagcattcaagctctccccctcagtttgcctggatctggacaagctgataagaaagcccagccacttcctctttgcgtcagaggggaagttcaaactgtgcaaaccctgactgtcaaatgcactgagctctcataaccacaacaaaaaccagagccacttgttcgtcctttcactgaagcccaacagactggcgtgggtgcccgctttgctttccctagaaggcctcatgtgagtagtaaactttttcataacctcaaaaaaaaaaaaaaa

SEQ ID NO: 1378 - DNA, 3903 bp, Homo sapiens
gagagcgcggccttcattcctctcgtggaagtgagtgagtcctgggaccccgcgacctgttttaacttttatggtttggtcgtaggatcagcagggctcgcacttcggtcagcaggaaaagacgctgcggcgagcagcggagggcggagttgaatggctgggcagctgattgccttactgtatccggagctgctgcgttcggggcggttcgggagtcccctggttggaagtggacctgaatggggaggcgtctgaggatctcctgggctctcagcggcccgacccgccttcccccacctcccacagctctgtagcttcctagcggtgtaacgttgggaaaggaggctgttcttggactatgcctgacccgttttttaagaaagagtgcatcactcaacaggtggcgtctggagttatcctctgtggattttccaggatctcagacaagatcgtgcaatctcccagcctcctttccttcccctgccctgacttctgaaagaatgctgcgggagaggaggaaggagagcatcctggcttctggcagcagagccccactgtgacaggacctagcattcaccttcctcttctgttccgagtgcgagaagacttcagggacctctgtttcatggacattatcatattcttctcaagagtacccagcaagaggtttgcaaagaggagttattcagtgaaatcagaatcataccctgagagctacaagaactccatttttcactgtgcagaggctctctgctgaagggtcaagtggaatctggaatccagcccatgtttccccatcatcaagccatgtgaagctgcagactccaagcaacagagagacaagatttagaatactggctctggtatgaaagctggattcaggtactgttcctgcctcttgacctcaccaagcctcagcttcctcgcctgttaaatggatacaattgtcgtcattatcatctgttgagaactccctaaaatgccagctgagcataggcacagaagtttaggtgtttggaccaaggtcacacaactgatacaacagtagcttcttcacagacttggcacttctccagaaggaggaggacaaaatgacgaagtctaaggaggcagtgacattcaaggacgtggctgtggtcttctctgaggaggagctgcaactgctggaccttgcccagaggaagctgtaccgagatgtgatgctggagaacttcaggaatgtggtctcagtggggcatcagtccacaccagatggcctaccacagttagagagagaagaaaagctgtggatgatgaagatggcaacccagagagataactcctcaggagccaagaatctaaaagagatggagactcttcaagaagtaggattaaggtacctgcctcatgaagagcttttctgctcccagatctggcaacagattacaagagagttaatcaagtatcaagattctgtggtaaatattcaaagaacaggctgccagttggaaaaacgagatgatttgcactataaagatgagggattcagtaatcagagttcccatcttcaagttcacagagtccacactggtgaaaaaccctacaaaggagaacattgtgtgaaaagtttcagctggagctctcatcttcaaattaaccaaagggctcatgcaggagagaagccctacaaatgtgaaaaatgtgataatgccttccgtcggttttcaagtcttcaagcccatcagagagtccacagtagagcaaaatcatacacaaatgatgcaagttacaggagttttagtcagaggtcacatcttccccatcatcagagagttcccactggagagaatccatacaaatatgaagagtgtgggaggaatgttgggaaaagctcacattgtcaagctcctctgatagttcatacgggagagaaaccctataaatgtgaggagtgtggggtgggcttcagtcagagatcatatcttcaagttcatctgaaagttcacactggaaagaaaccatataagtgtgaagagtgtgggaagagcttcagttggcgttcacgactgcaggctcatgagcgaatccacactggcgagaaaccatacaaatgcaatgcatgtggcaagagctttagttacagctcacaccttaatattcattgtagaatccacacaggagagaaaccctataagtgtgaggagtgtgggaaaggtttcagtgtgggttcacaccttcaggcccatcagataagccacactggagagaagccatacaaatgtgaggagtgtgggaaaggcttctgccgggcctcaaatctgctggaccatcaaagaggccatactggagagaaaccgtatcagtgtgatgcatgtggtaagggcttcagtcgtagctcagattttaacattcattttagagtccatacaggggaaaaaccctataaatgtgaggagtgtggcaagggcttcagccaggcctcaaatcttctggcccatcaaagaggccacactggagagaaaccctacaaatgtggtacatgtgggaagggcttcagtcggagctcagatcttaatgtacactgtagaatccacacaggagagaaaccctataaatgcgagaggtgtggtaaggccttcagtcagttctccagccttcaggtgcatcagagagttcacactggagagaaaccatatcagtgtgcagagtgtgggaagggcttcagtgtaggttcacagcttcaagcccatcagaggtgccacactggagagaaaccctatcaatgtgaggagtgtgggaagggcttctgtcgggcctccaattttctggcacatcgtggagtccacacaggagaaaaaccataccgatgtgatgtgtgtggtaagcgcttcagacagagatcctaccttcaagcccaccagagggtccacacaggagagagaccatacaaatgtgaggaatgtgggaaagtcttcagctggagctcataccttcaagcccatcaaagagttcacaccggagaaaaaccatacaaatgtgaggagtgtgggaagggcttcagttggagctcaagtcttatcattcatcagcgagtccatgctgatgatgagggtgacaaggactttccttcatcagaggattcacacaggaaaactcgataaaatatgttttactatctcagatgggtgctgaaatattttaataatcagagctatcatagacaaaacatttgttttatagagtcagtagttcagccaagtgattgggagaccacacagcagagaagcctcacaagagtggagacatatggactgcattcagaacattgaccattagctgatacatgcagacaagaggatcaggaaggatgagtctgatctggagtaaatcagaagtactaagatagaaatgctgaattctgttccactagaatataagatccaagagggcagggactttgttgactgccaaatctactctgccttttcagtgcctaatacgttgtaatttttcagtagtatttgaaattactgtcatatttgaaattcagtaatatttgacatttttatttatctctagaagtttctctaaaattgtactcagaagaattctgcaaggcttggaggatatataagttagtcatatggcctgattttcccatttttgcagatctcgtggacaagtgtttatcaaactgaaggttgcagcttgttagtgggttcagaaatcagtttctggctagcaactagaagttttgtatgttaacagtactttattgaggtgtaatctgcatgcagtaacatgcacaagtctcaagttcatggctttctgaattttgacaaatgtaatcatcaccaagatcaatgtatacaatatgtctattaaaccaaaaagttttcttgtgcccatttccagtcaatccca

SEQ ID NO: 1379 - DNA, 2300 bp, Homo sapiens
attgtgttctgactgcgatgtggcgcttgcgatctctcgccgccggcagaggctcctcgaagagcgacacggggctgaccaggcacggtggtcaaagccgcagagggagagcgggagcggtcgtgaggtcgtctggggagaagggcggaggcaaagccgaggagcaggtgtgtggacccttctagcctgaggagtcctgcaggtgtgaagctccacacctgcctccatagcactttgcctgtccctaagagggctcatcggagaagaaagaatggctgtcagccacctgccaaccatggtccaggaatcggtgaccttcaaggatgtggctatactgttcacccaggaggagtgggggcagctgagccccgcccagagggccctgtacagggacgtgatgctggagaactacagcaacctggtctcactgggactcttaggacccaaaccagatacgttttcccagctagaaaaaagggaagtgtggatgccagaggacacccctggaggcttctgtcttgactggatgactatgcctgccagtaagaaatctactgtcaaggcagagattcctgaagaagaattggatcaatggacaataaaggaaagattcagtagcagtagtcactggaagtgtgctagcctgctggagtggcaatgtggaggccaggagatcagtttgcagcgagtggtactcactcaccccaacaccccatcacaggaatatgatgaatccgggagcactatgagctcatctcttcacagtgatcaaagtcagggatttcaacctagcaaaaatgcctttgagtgtagtgagtgtggaaaagtcttctctaagagttcaactcttaataaacatcagaaaattcataatgaaaaaaatgcaaatcagaaaattcatattaaggagaaaagatatgaatgtagagaatgtgggaaagcctttcaccagagtacgcaccttatccatcaccaaagaattcacactggcgagaaaccctatgaatgtaaggaatgtggcaaggccttctcagtgagctcctcacttacgtaccatcagaaaattcatactggagagaagccttttgaatgcaacttatgtggaaaagcttttatccgaaatatacaccttgcccatcatcatagaatacatactggagagaaaccttttaaatgtaacatttgtgaaaaagcctttgtgtgcagggcacaccttaccaaacaccagaatatccacagtggagagaaaccctataaatgcaatgaatgtggaaaagcctttaatcagagtacaagtttccttcagcatcagagaattcacactggagagaaaccctttgaatgtaatgaatgtgggaaggccttcagggtgaactcttcccttactgaacatcagagaattcatactggagagaaaccttataaatgtaatgaatgtgggaaagctttcagggataattcatcctttgcacgacatcggaaaattcacactggagagaaaccttacagatgtggcttgtgtgagaaagcctttcgggaccaatcagcactagcccaacatcagagaattcatactggggaaaaaccttatacatgtaacatatgtgaaaaagccttcagtgaccattcagcccttacccaacataagagaattcatactagggaaaaaccttacaaatgtaaaatctgtgagaaagcctttatccgaagcactcacctgactcaacatcagaggattcacacaggagagaaaccctataaatgtaataaatgtgggaaagcttttaaccagactgcaaacctcattcagcatcagagacatcatattggagagaagtgatatgaatgcagtttgtatggaagacctttgagactgagtagatgaattattgaatgtgagataatccgttctagagaataactatgaaagcttgcatcaagatagtcactttatttactgagggtcaggtttcacagtgtcatggggtttgggcatttaagaatggcaaacactcggctgggcacggtggctcacgtctgtaatctttgggagcactttgggaggccgaggtgggcggatcgcgaggtcaggggatcgggaccatcctggctaacagggtgaagccccatcgctactagaaatgtagaaaattacccgggcatggtggtgggcgcctgtggtcccggctgctcgggaggctgaggcaggagaatggcatgaacccgggaggcggaggttgcagtgagccgagatcgtgccactgcgctccagcctgggcgacagagcaagactcagtctc

SEQ ID NO: 1380 - DNA, 1609 bp, Homo sapiens
ctttcccctgctaccagacacgcggtcacgtggggccatcgcgggctgccggcgcgggaagccgcgcgagaggcggccgaggggtgcgtgagtcggcgccactgcttgcagtgcgcggcttgggagcccgcccctcctgcacggaggagtcggcctgccgccgcggcggcatctggaaccacaatggacactgccagccatagccttgttcttctccagcagctgaacatgcagcgagaatttggttttctgtgtgattgcacagttgcaattggagatgtttacttcaaagcccacagagcagtgcttgctgctttttctaactatttcaagatgatatttattcaccaaacaagtgaatgcataaaaatacaaccaactgacatccaacctgacatattcagctatttgttgcacattatgtacacggggaaagggccaaaacagattgtggatcatagtcgtttggaggaagggattcgatttcttcacgccgactacctttctcacattgcaactgaaatgaatcaagtgttctcaccagagactgtgcagtcctcaaatttatatggcattcagatctcaacaacccaaaaaacagttgtcaaacaaggactggaggtcaaagaagctccttccagtaacagtggaaacagagctgctgtccagggtgaccacccccagttgcagttgtctcttgctattggtctggatgatggcactgcagaccagcagagggcctgtcctgccacccaggccctggaggagcaccagaagcccccagtttccatcaagcaggagagatgtgacccagaatctgtgatctcccagagccacccctcaccctcatcagaggtgacaggccccacttttactgaaaacagtgtcaaaatacacttatgccattactgtggggaacgttttgattcccgtagtaacctaaggcaacatctccatacacatgtgtctggatccctgccattcggtgtccctgcttccattctggaaagtaatgaccttggtgaagtgcatccccttaatgaaaacagcgaggcccttgaatgccgcaggctcagctccttcattgttaaggagaatgaacagcagccagaccacaccaaccggggtaccacagagcctttgcagatcagtcaagtatctttgatctccaaagacacagagccagtagaattaaactgtaatttttctttttcaaggaaaagaaaaatgagctgtaccatctgtggtcataaattccctcgaaagagccaattgttggaacacatgtatacacacaaaggtaaatcttacagatataaccgatgccaaaggtttggtaatgcattggcccagagatttcagccatactgtgacagctggtctgatgtctccctgaaaagttctcgcttgtcacaagaacacttagacttgccttgtgccttagagtcagagctcacacaagaaaatgtggatactatcctagttgagtagcagcttctctttcagaatttttataccaattctgaaaaagaaaatttgcgtggcatttttaattcataaattattttcctcctcaaaaaaaaaaaaaaaaaaaaaaaaaaaaaaaaaa

SEQ ID NO: 1381 - DNA, 1935 bp, Homo sapiens
ggagccccgaggggccggagctcctggcggtgccggatcctgacggcggccttcccccgggtctgtctgccaaaatgtctgaaagatcagatctccttcacttcaagtttgaaaattatggagattcaatgttacaaaaaatgaacaaattaagagaagagaataaattttgtgatgttacagttctcatagatgatattgaggtacagggacataaaattgtgtttgctgcaggttcccccttcttaagagaccaatttttactgaatgattccagagaggtgaaaatctccatattacagagttccgaagtggggagacaattgctcttatcctgttatagtggtgtgctggaattccctgagatggaactggtaaattacttgactgctgcaagttttcttcagatgagccacattgtagaacggtgcacacaggccctgtggaagtttataaagccaaaacaaccaatggatagtaaagagggatgtgaaccacagagtgcttctccccagtcaaaagaacagcagggagatgccagaggctccccaaagcaggactcaccttgtattcatccatctgaagacagtatggatatggaggacagtgatattcagattgttaaggtagaatctattggggatgtatcagaggttagaagtaaaaaagatcagaaccagtttatttcttctgaacccactgctttacattcatcagagccccagcactccctgataaattcaactgtggaaaacagagtaagtgaaatagaacaaaaccatctccacaattatgccctttcttatacaggcagtgataacatcatcatggcctcaaaagatgtctttggccctaatattcgaggtgtagacaaaggcctacagtggcatcaccagtgcccaaagtgtaccagggtgtttcgtcacctggagaactacgccaaccatttaaaaatgcacaaactctttatgtgtctactctgcggcaagactttcactcagaaaggcaaccttcatcgacacatgcgtgtgcatgccggaattaaacctttccagtgtaaaatctgtgggaaaaccttttctcagaagtgttccttacaggatcatcttaaccttcacagtggagataagccccataaatgtaactattgtgatatggtttttgcacataaaccagttttgaggaaacaccttaaacagctgcatggcaaaaacagctttgataatgccaatgagagaaatgtacaagacctcacagtggattttgattcttttgcatgtacaacagtcacagactctaaagggtgtcagccacaacccgatgcaacacaggtcctggatgcaggtaaactggcccaagctgtcctgaacttaagaaatgatagtacttgtgtgaattgagtaggggcttcatgctcacaactcgaactgactgacaatgtggcaatagtcttagtctttttaggagtgattttgctagtttgacttctccaaagcctctgtgtaggtggtagggagtgagtcaaagcactaatagaccaggcaacttaccacttggagtggatttgccttacttttgccctctcccattttctgttttgagttatttatcttgtaaagtctgttttcctttcccaaggaataattccttttgtctacctaacattgacttatgtcttagactgacactgttttaggcttttcactaggcacattccgaaggtaccaacaagttaataacatcacctactctccactaatagatgctatgctaagagaagtgaataatctttctttggtagaaaataggctgagatataaggtgatattgctattgacctgaaaatgtgatagaacttctggttgcctattgattattcctccatgtctgataaatgaatctgcttcctaaaaaaaaaaaaaaaaaaaaaaaaaa

SEQ ID NO: 1382 - DNA, 1123 bp, Homo sapiens
ggagctctaggtcgcctcttcgctactctgtgtcctctgctcctagaggcccaccctctgtggccctgtgtcctgtaggtattgggagatccacagccaagatgccgggaccccttagaagcctagaaatggaatcattgcaatttagagatgtggctgtagaattctctctggaggagtggcattgcctggacactgcacagcagaatttatatagggatgtgatgttagagaactacagacacctggtcttccttggtattattgtctctaagccagacctgatcacctgtctggagcaaggaataaaacctctgactatgaagagacatgagatgattgccaaacccccagttgtgtgttctcattttgcccaagacctttggccagagcagagcataaaagattcttaccaaaaagtgatactgagaaaatttgaaaaatgtggacatggcaatttacactttaaaaaaggctgtgaaagtgtggatgagtgtaagttacacaaaagaggttataatggacttaaccaatgtttgacaactacccagagcaaaatatttcaatgtggtaaatatgtgaaagtctttcatcaattttcaaattcaaagagacataaaagaagacatactgaaaaaaaacctttgaaatatatagaaggtgacaaagcttttaaccagtcctcaacccatactacacataaaaaaattgatactggagagaaaccatacaaatgtgaagaatgtggcaaagccttcaaccggtcctcatgcctgtaatcccagcactttgggaggccaaggtgggaggatcacctgatgtcgggagtttgagatcagactgaccaaaacggagaaacccagtctctactgaaaatataaaattggccatgcatggtggcacatgcctgtaatcccagctactcaggaggcttgaaccctggaggcagaggttgtggtgagtcgagatcattgcactccagcctgggcaataagagtgaaactctgtctccaggaaaaaaaaaaatttatttgtgtataactttaaaagcagatttttggaagcattgtaattacattaaaagtatacttgttcaaaaaaaaaaaaaaaaaaaaaaaaaaaa

SEQ ID NO: 1383 - DNA, 6098 bp, Homo sapiens
agatctcgcttccgccggtgggacggaactggtgccctccgtggacaattgtgttgaagcagaaattgttccggatctcgggtcggacacggaagtcttcctgcagtgtttctggatgcggggacagggatgcgcaggaattccagtctcagtttccagatggagcgacccctcgaggagcaagtccagagcaagtggtcgtctagtcaaggccgcacaggaacaggagggtctgatgtcctccagatgcagaacagtgaacaccatggacaaagcatcaagactcaaactgactccatctcccttgaggatgtggctgtgaacttcaccctggaggagtgggctttgctggatcctggccagaggaatatctacagagatgtgatgcgggcaaccttcaagaacctggcctgtataggggaaaaatggaaagaccaggatattgaagatgaacacaaaaaccagggaagaaatctaagaagtcctatggttgaagcactctgtgaaaataaagaagattgtccatgtggaaaaagcactagccagattcctgatcttaatacgaacctggaaactcctactggattaaaaccatgtgactgcagtgtgtgtggggaagtcttcatgcatcaggtctcccttaataggcacatgagatctcacactgaacagaaaccaaatgagtgtcacgaatatggagagaagccacataaatgcaaagaatgtgggaaaaccttcactcgcagctccagtattcgaacccatgaaagaattcacactggagagaaaccctatgaatgtaaggaatgtggcaaagccttcgcatttctcttttcctttcgaaaccatataagaattcatactggagagacaccctatgaatgtaaggaatgtgggaaggcattcagatatctcactgctcttcggcgccatgaaaaaaatcacactggagagaaaccctacaaatgtaaacagtgtggaaaagcctttatatattaccagccttttctaacccacgaaaggactcacactggagagaaaccttatgaatgtaagcaatgtgggaaagccttcagttgtcccacgtacttacggagtcatgagaaaactcatactggagagaaaccttttgtatgtagggaatgtgggagagccttcttttctcactcaagccttcgaaaacacgtgaaaacccacaccggagttcaaccttatacatgtaagaaatgtggggaagccttcaagtcatctagttcctgtgaagtgcacgaaagaactcattttggagaaaaaccctatgaatgtaaacaatgtggtaaagccttcaattcttcaagttaccttcagttgcacgaaagagttcacactggcgagaaaacttacgaatgtaaagaatgtggtaaagcctttctttattccactcactttcgaatccatgaaagaacccatactagagagaaaccctatgaatgcaaacagtgtggtcgggtcttcatttacttcagtcaccttcgaaggcacgaaagaagtcacactggagtgaaaccatgtgagtgtaagcagtgtggcaaagctttcacttgtttaaattccctgaaagtacacaaaagaattcatactggagaaagaccctttcagtgtagacaatgtggtaaagccttcagttactcaaagtctttgcacgtgcacgaaaggactcatagtagacagaagccctaagaaagtaaagtgtggtaatgctgtcagttgtattagttccttttggatgtatgagagtacttacgctggagagaaattcaaggaatgtaaacggtgtgattaagccttcagttgtcctaattccctttgaagacgtgactcatgcggcaatgaaatatttaacaaatgggggaggaacttgcactctcctgcgggattgcagatatgtgaatggactccatggacagaaaagctacgaatgtatggagtgtaggaaagccttcacttcacgtaatcttttaaagacacctgagaatatatactggagagaaactataaagaaaattctatatccatcccatcttttgtggggtttgttttttgtttttgtttttgttgagatgtaattttgctcttgttgcccaggctggagtgcagtggtgcgatcgcggctcaccgcaacctccgcctcccggattcaagcaattctcctgccgcagcctcccaagaagctgggattacaggcatgcgccaccacgcctggctaattttgtaattttagtagagatggggtttctccatgttggtcaggctggtctcaaactcctgacctcaggtgatctgcctgcctcggcctcccaaagtgctgggattacaggtgtgagccacagcacccaacctttttttccccgccgcaccccaagatggtgtctcactctgttgccccaggctggagtgcagtggtgtgatcctggctcactgtaacctctgggttcaagcaattcttctgcctcagccttccaagtagctgggattacaagtgcccaccaccatgcccagctaatttttatatttttagtagagacagtgtttcaccatgttgaccaggctgatcttaaactcttgacctcaaatgatccacccaccttggcctcccaaattgttcgttttacttttttttttttttttttttgagctggagtcttactctgttgcctaggctggagtgaaagtggcgcaacctctgcctcccaggtcaaagcaatcctgcctcaggccccctagtagctggcattacaggcacatgccaccacgcccaactaatttttatatttttagtagagacggggtttcaccatgttggccaggctggtcttgaactcctgacctcaggtaatccacctgccttggcctcccaaagtgctgggattacaggcgtgagccaccacacccggcccccagttctttttttttttttttgagacggagtccttgcccaggctggagtgcagtggcgcgatctcagctcactgcaagctccgcctcctgggttcacgccattctcctgcctcagcctcccgagtagctgggactacaggcgcccgccaccacgcccggctcattttttgtatttttagtggagacggggtttcaccgtgttagccaggatagtcttgatctcctgacctcgtgatccgccctcctcggcctcccaaagtgctgggattataggcgtgagccaccgcgcccggcctccagttcattttaaaaccatgaaaccacccacactggagagccaccttcttaaatgtaagcaatatgggaacatcttcaatgacatctgcaaccattgtcgagattcttcgtaggaagaattaaaggaatggggaagaaggacttgggccccagcaggccttttgtggcatccagtcagaagttaggaaacaccctctagggcagtgcctgccctcagctctcacacatgactggagagaagtgagaagactcccagaatctgccttttaagtttccatcagtgtcctcgggtcagactgtgggaatgctgtacttctaagacaaaggttcgcatcttacagtttttccccaagtgggatctgcctatgcacatcctaattcacagacattgtcagcattgcattattccagggctgttttgaggtcatctccagctccatttcccatctcaaacctacactttggacacttgtttaaacattcacatctgaatttctctgtggcaaccgcaggtggctctgaggtgagagactgaagaagcagagcctgtatcatgggacacacaccccttgaccacacagcatccactctcctgcggttaccagccctgcaccaaccaccacagtcagaataatctcaaaactgctagtggagtcacagacacactctgccatgtcttagctgtaggacactcagaattcttacctcccctaacttgctttccctgttttctggcacattctaccctgagatattcagcggcatatgcactgatgatgctccggccttctcacgtcagtgcatgtcacatgcatcctgctccaggactggtttcctagcctcccgctaagactagcacttagctcttcttggaaaaggacccaccctgcagcgctccagctctgttgtgtatgggaggtgctggtgtcagggttcacaagccatggaactaccttgcttcacatcacaaggcaaggtgaactcaactcccaataaactgcttgctggagcctccgaattctccgttttctgaattgcataggcacgataggggtcgggtctgtcctttgttggagtcagtccccccttttcttagcaagtcagtgtgttttagaagggaggtggcagcattgagggaaaccaggtcaccatccaccctcgtaacaacagtctccctgggtgggtcccagaagtgatctttgtgtcgctcgggtcggaactctttaggcctctggcctccaccctcccccaacagcagggatgggtcaggtggcagcatccaaaaccacggtgaagatactagggtccagaggccgactggagcaaggtttgctggcagatgaggcctcagtggaagtgacggctactgtggagatgcagtggaggacctggtggctgagccaggagatgcacaccttcgcttctctcaccaggaacattcgcttctctcaccaggaacatttatggtagtatgaggggttggaacattattactcaacccatttcaggtcctttcacattcttgagctgccatgttgtgcttttgtagagagatgattattgtactgtgggaggtcaggaagttcgagattccttcactgtcagaatgggctcaaggagccatcttttgtgataggtattggggaactaaggggtatctctgctacaggaatgggagtgagaacattcactttttgaaggacaagtatatgtgggtctatgatgatgtttttgtaaaacccttttgtgtatgtgtctgtgtgagtcctaatattcagtaagtattttcctctgtgtaactccctctaataggtgtagtcaacaaagctgtgctaatatctctgtccccttgatcctggcattctggaagacacgaaagcaagcaaggatatataaggcactgtggtggttattcccgaggagccagagaaacctggagaagagatcagaacacctggggtccttctatttgggagaatcttttagtatctgggctgttacacctgtgggtttgtgaatttgtgtctgtccacctgtatgtacagtgataacgtgtgtgatttttgtatatttgtctagagggctgtgtgtatatatatttatatatatttttaaatatggaatgcttttaggtttttttttttttttttttttttgagatggattctcactgttgccaggctggagtgcagtggcacaatcttggctcactgcaacctccacttctcaggttcaagcaattctcctgcctcagcctcctgagtagctgggactataggcgcgtgccaccacaaccagctaaatttttttgtatttttagtagagatggggtttcaccatgttgaccaggatggtctcaatctcctgaccttgtgatccacccacctcggtctccccaaagtgctgggattacaggcgtgagccactctgcctggctggttattttgtttgtttgttgtttttttgagacacagtctcgctctgtcaccaagctggactgcagtggcatgatctcggctcactgcaatctctgcctcccaggttcaagcaattctcctgtttcagcctcctgagtagctgggattacaggcgcgtgccaccataccgagctagtttttttatttttagtagagacggggtttcaccatgttggccaggatggtctcgccctcctgaccttgtgatctgcctgcctcggcctctcaaagtgctgggattagaggcttgagccaccaggcccggctggaatgcttgcattttcttgcctgatttccctgggagcaccccccttaacactgaatggagctggtgagagcaaatatccttgtttctgatattagatattaaaaatatggtttttcacc

SEQ ID NO: 1384 - DNA, 2823 bp, Homo sapiens
gttgctggggtccgttgcgttctgcatccagtccttgctgctccgagaggccccaggtgcctccgccacggctcctgtgacgctgtcacctgcgctgtgacctgctccggagtcataaagaggacgccgggacaccaagaagcagggaaatggacccagtggcctttgaggatgtggctgtgaacttcacccaggaggagtgggccttgttgaatcctttccagaagatctctacagagatgtgatgcaggaaaccttcacgaacctcatctgtatagaaattttatgggagagagactctttgagagtgcagaaggtagtcagtgtggagaaactttcacccaggttccggaagacatgctgaacaagaaaactcttcctggagtaaaatcatgtgaaagtggtacatgtggagaaatcttcatgggatattcatcctttaataggaacatcagaactgacactggacaccaaccacataagtgtcagaaatttttagagaagccatataaacataaacaacgtaggaaagccttgagccatagccactgctttcgaacacatgaaaggcctcacactagagagaaaccttttgattgtaaggaatgtgaaaaatctttcatttctcctgcaagcattcgaagatatatggtaacgcacagtggagatggaccttataaatgtaagttttgtgggaaagccttggattgtctcagtttataccttacccatgaacgaactcacactggagagaaacgatatgaatgtaaacaatgtggtaaagccttcagttggcacagttctgttcgaatccatgaaagaactcacactggggagaagccatatgaatgtaaggagtgtgggaaatcattcaatttttccagttcctttcgcagacatgaaaggacacacacaggagagaagccgtacaaatgtaaggaatgtgggaaagccttcaattgtcccagttcttttcacaggcatgaaaggactcacacaggagaaaaaccctatgaatgtaaactatatgggaaagcattatctcgccttataagctttcgaagacacatgagaatgcacactggagagaggcctcataaatgtaagatatgtgggaaagccttttactctcccagttcatttcaaaggcatgaaagaagtcacactggagagaaaccctacaaatgcaagcaatgtgggaaagccttcacttgttccacttcgtttcaatatcatgaaaggactcacactggagagaaacccgatgggtgtaagcaatgtgggaaagccttcagatctgccaagtacattcgaatacatggaaggactcacactggtgagaaaccctatgaatgtaagcaatgtgggaaagcatttcattgtgtcagctcctttcatagacatgaaaggactcacgctggagaaaaaccttatgaatgtaagcattgtgggaaagccttcacttgttccatatatattagaatacatgaaagaattcacactggagagaaaccttaccaatgtaaggaatgtgggaaagccttcattcgttccagttactgtcgaaaacatgaaagaactcacactattaatatatgagagaaatgctattttttaatttttattttaatagagacagggtctcactatcttgtccaggttggtcttgaactcctggcctcaagcatccctcccagcttgaagtgtcaataaaggaaggcaataaaatgtagagatggagttaggtgatgccacgctgggattcactggtggcctatcttacatatgatttcgaaggcagacatgaggaaggccttagtcacattttagagccagccaaattcacatgggctgtgtggccccctgattctagcccattttcctgattctctggcttgtcaatcaagagtatcctccaaatctcttgactttccttttttcagaggtgtaggtttccaaagatgtccccagaagctccacattcaagttctatctacagtttggtttttctttaagtattgtaatgtacataccagagagataatgcagactgtcatgggtggggaatgttctctgatgctcaactcccctagtctgcagattgagttggtaggaggtgtgatttgtttacatgcacctttgttcctgctggtagtgaccttgttcttgattcagcctgacagctactatgctgccatcagaaccaacttgatgagagctctgctgccctgtgcagtgactggtctcatccaggactctcatgtgagaaggaacaccttgctctggtcaggaaatgtccagtgtttcctgttatccacaggagaatgtaatgcctcagttcattttcagttatctttgattatatgtgattgacaatgtgtatttttgagggagcaaagatttctgtacatatttcttaaaaatagtttattcagctgggtgcagtggctcatgcctgtaaccccagcactttgggaggccgaggtgggcggatcacgaggtcaggagtttgagactagcctggccaacacagtgaaaccccatctctactaaaagtaccaaagttagccgggtgtggtggtggatacctgtaatcccagctactcgggaggctgaggcaggagaatctcctgaacctgggaggtggaggttgcagtgagccaagatcacgccactgtactccagcctggacaagagagcaatactctgtctcaaaaaaaaaaaaaaaggtttattcactgtttttcagttgtgtacttgcaaatgtttttctcttttttttgtatactgagaagctctattaaaatatcccttgtcaacatg

SEQ ID NO: 1385 - DNA, 4732 bp, Homo sapiens
gatgtggctgggccattgtttctctctgctgccggagctccaggtctacccttcactgctctgtgtcctcagcgtgtgtggcttcgtgacctgaagatactgggaaatccatagctaagatgccaggaccccctgaaagcctagacatgttatatgttctcattttgctgaagacttttgcccagggccaggcattaaagattcttttcaaaaagtgatactgagagaatatgtaaaatgtggacataaggatttacagttaagaaaaggatgtaaaagtatgaatgagtgtaatgtgcacaaagaaggttataatgaactaaaccagtatttgacaactacccagagcaaaatatttcaatgtgataaatatgtgaaagtctttcataaacttttaaattcaaatagacataacacaaaacatactggaaagaaacctttcaaatgtaaaaaatgtggcaaatcattttgcatgcttttacacctatgtcagcataaaagaattcatattagagagaattcttaccgatgtgaagaatgtggcaaagcctttatctggttttcaacccttactagacacaggagagttcatactggagagaaatcctacaaatatgaatgtggcaaatcttttaaccaggactcaaaccttactacacataagagaattcatactggacagaaaccctacaaatgtgaagaatgtggcacatctttctaccaattctcataccttactaggcataagctaattcatactagagagaaaccctataaatgtgaacaatatggcaaaacttttaaccaatcttcaacccttactggacataagataattcataatggagaaaaaccctataaatgtgaagaatgtggcaaagcctttagtattttctcaacccctactaaacataagataattcacactgaagagaaatcccacagatgtgaagaatattgcaaagcttataaggagtcctcacaccttactacacataaaagaattcatactggagagaaaccctacaaatgtgaagaatgtggcaaagcctttagtattttctcaacccttactaaacataagataattcacactgaagagaaatcccacagatgtgaagaatgtggcaaagcttataaggagtcttcacaccttactacacataaaagaattcatactggagagaaaccctacaaatgtgaagaatgtggcaaaacctttagtgtattctcaattcttactaaacataaaataattcatacagaagagaaaccctacaaatgtgaagaatgtggcaaagcttttaaacgatcttcaacccttactaaacataggataattcatactgaagagaaaccctacaaatgtgaagaatgtggcaaagcttttaaccaatcttcaacccttagtatacataaaataattcatactggagaaaaaccctacaaatgtgaagaatgtggcaaagcttttaaacgatcttcaacccttactatacataaaatgattcacactggagaaaaaccctacaaatgtgaagaatgtggcaaagcttttaatcggtcctcacaccttactacacataagagaattcatactggacacaaaccctacaaatgtaaagaatgtggcaaatcctttagtgtattctcaacccttactaaacacaagataattcatactgataagaaaccctacaaatgtgaagaatgtggcaaagcttttaaccgatcttcaatccttagtatacataagaaaattcatactggagaaaaaccctacaaatgtgaagaatgtggcaaagcttttaagcggtcctcacacctcgctgggcacaagcaaattcatagtgtacaaaaaccctacaaatgtgaagaatgtggcaaagcctttagtatattctcaacccttactaaacataagataattcatactgaagagaaaccctacaaatgtgaaaaatgtggcaaaactttctaccgattctcaaaccttaatacgcataagataattcatactggagagaaaccttgcaaatgtgaagaatgtggcaaagcttttaaccattcctcaaaccttattaaacataagctaattcatactggagacaaaccctacaaatgtgaagcatgtggcaaagcttttaggcggtcttcacatcttagtagacataagataattcatattggaattcatactgaagagactgtacaaaagtgaagaatgtggcaaaggcctttactgctcctattcccttactaaagaatgtggcaaagcttttcaccagtactttacccttaatacacataagataattaatgctggagagaaaccctacaaatgtgaagaatgtggcaaagatttctattgattctcataccttactaaatataagataattcatattggagagaaattctacagatgtgaagaatgtggcaaaggctttaattagttctcatcccttactaaacataagagaattcataccatagagaaatcctacaaatatgaagaatgtgacaaagcttttaaccacttctcaaccctgcctacacgtaagataattcatactggaaggaaaccctacaaatatgaggaatgtctcaaagctttttactgattcttataccttactaaacataaaataattcataaaggagataaattatacaaatgtgaagaatgtggcaaagcttttaacaaatcctcatccattagtaaacataagataattcatactggagagaaaacctacaaatgtgaggaatgtggcaaagcctttagcctgtccctccaatttactgcacataagataatttatactggagagaagccctacaaatgtgaaaaatgtggcaaaccttttaaccaatcctcaacccttactacacattagataattcatgctggagagaaaccctacaaatgtgaaaaatgtggcaaagcttttaaccaattttcaaaccttactaaacataagataactcatactggagaaaaatcttacaaatgtgaagaatgtggcaaagcctttatccagtcctcaactcctagtaaacataattaatgatggagagaaaccatacaactgtgaagaatgtggcaaagcttttaaccagtcctcaaactttattgaacaaaataattcatacaggagagaaaccctacaaatgtgaagaatgtgacaaagcctttaaccagtcctcaatttttactaaacataagaaaattcatactggagagaaaccctatgattgtgaaaaatatggcaaaggctttaactagtcctcagttcttaacacacatacgataattcttactgcagagaaactctacaaaccagtaagatgtgacagtgcttctgacaacatctcaaacttttctaatcataaaagaaatcatattggtgagaaatcctagaaatgtggagaatgtaacaaagtatttaaatggttgtcacacttgattataggtaatattcatattggaaaaatttcctacaagtaagaacaatgtggcaaagtttttaactaatacaccttattgcacagaaaatcatttatatttgagaaaaattgtagaaatatagactgtgaaaaagacgtcaatatctgctcacatcttactaaacaccagagagttcatgcttaataaaagcatgataagtgcaattactgccaaaagatctttcagaaaatattatcctttaaagtgaaggagagtatttatattaaagatgaacattacaaccataaagagggttgaagtacctttacttgtatcagatcttattgtccacattttgtactacagaaaaactctgaagaggtcactcaaactttgttcaacatcagggaatttatattggagagctgtcttgcaaatgtaataaatttgggaaaacaaattttcaaaaactacagcttagaaaacaccagagtttatacgaaaatatattttcaaaggtgtagtaaaaataaaaaaaattttaatccaaatttgtctatgtaaataccagaatttatagtagaaatatatgaggaagcgacacttcgaatattctactaaatgagagttctgagtatagaaaataaaactaaagttggtagaaaaattatttgtatataatgttaagaggagtaaaagattttttgtagaataataactatattcggattatactttgtttcttgaaaaaattacagattttttgaaaagcaaatgatgtaactcaactcattattttctgctgtttcttcattcttattcacttgtgaaagcttgtgatcatttgttgctgcatcagaggtatgagagattcttcttcattagatgggcattatttatgatcttttctatggatgagtaagaatattaaaatgtaagatgcatggtgaaaatctaagtggagaggttctttgtggttaacttatactattgagtgatgcacaaggtaggtgttaagagtaatattcttttgcattatgagaaaactagtatattattcatatattttactaattgtactttttttattatactttaagttttagggtacatgtgcacaatgtgcaggttagttacatatgtatacatgtgccatgctggtgcgctgcacccactaactcgtcatctagcattaggtatatctcccaatgctatccgtcccccctccccccaattgtacttttatataataaaatgcagtacattttaaaaaattttaaa

SEQ ID NO: 1386 - DNA, 2260 bp, Homo sapiens
ccttgtaattcataaatctctgaaaacttaaaagtttgagcaaaagtttgtcatgtttctatgagtaatttataataaaacttgatcagaatttgtgagactaacgtttgtctttatattttccttttttttttttttttttttgagacacagtctcgctctgtcgtccaggctggagtgccgtggcgtaatctcggctcactgcaacctctgcctcctggattcaaacaattcttctgcctcagcctcctgagtagctgggattacaggaccagtgatggtatagaacactgtattagagacatggagctggggctggatgaagattccatcagtaattcaatcaacagacaagtgttatccaatcacgtctttaaatcaatcactgacatggagctggggctggatgaagattccatcagtaattcaatcaacagacaagtgttatccaatcacgtctttaaatcaatcactgatcccagcccctataaaagggagcagccttaggaggcacatcagataaacccagtgtggaaagctagtcacacatcagctcagtgttcggcccgggattacccagtcaaccaaggagcttgcagttttaaagaatccaccaactgttgaaacaaatccctagagacacaaggcaagagactgaatcatcaaagtaaagtctctctgagaattattgctaagaatggctttagatctaagaaccatatttcagtgtgaaccatccgagaataatcttggatcagaaaattcagcgtttcaacaaagccaaggacctgctgttcagagagaagaagggatttctgagttctcaagaatggtgctcaattcatttcaagacagcaataattcatatgcaaggcaggaattgcaaagactttataggatctttcactcatggctgcaaccagaaaagcacagcaaggatgaaattatttctctattagtcctggagcagtttatgattggtggccactgcaatgacaaagccagtgtgaaagagaaatggaaatcaagtggcaaaaacttggagagattcatagaagacctgactgatgacagcataaatccacctgccttagtccacgtccacatgcagggacaggaagctctcttttctgaggatatgcccttaagagatgtcattgttcatctcacaaaacaagtgaatgcccaaaccacaagagaagcaaacatggggacaccctcccagacttcccaagatacttccttagaaacaggacaaggatatgaagatgaacaagatggctggaacagttcttcgaaaactactcgagtaaatgaaaatattactaatcaaggcaatcaaatagtttccctaatcatcatccaggaagagaacggtcctaggcctgaagagggaggtgtttcttctgacaacccatacaactcaaaaagagcagagctagtcactgctagatctcaggaagggtccataaatggaatcactttccaaggtgtccctatggtgatgggagcagggtgtatctctcaaccagagcagtcctcccctgagtctgcccttacccaccagagcaatgagggaaattccacatgtgaggtacatcagaaaggatcccatggagtccaaaaatcatacaaatgtgaagaatgccccaaggtctttaagtatctctgtcacttattagctcaccagagaagacacaggaatgagaggccatttgtttgtcccgagtgtcaaaaaggcttcttccagatatcagacctacgggtgcatcagataattcacacaggaaagaagcctttcacatgcagcatgtgtaaaaagtccttcagccacaaaaccaacctgcggtctcatgagagaatccacacaggagaaaagccttatacatgtcccttttgtaagacaagctaccgccagtcatccacataccaccgccatatgaggactcatgagaaaattaccctgccaagtgttccctccacaccagaagcttcctaagctgctggtctgataatgtgtataaatatgtatgcaagtatgtatattcctatagtatttatctacttaggatataagatataatctcctgattatgctttcaatttattgtcttgcttcattaaaatgtaaggctaaggagagcatggaatttgtcagttttgttcactaaagtattccaagtggttgggaaagtggaacatttccaagaaccaataaatttctgttgaataaatgaatgaatccaaaaaaaaaaaaaaa

SEQ ID NO: 1387 - DNA, 1938 bp, Homo sapiens
cccagaccgagaaggtcggaggcagaagccgggaaggagacttctgaatgaacagtgaatctattactgaggaaaaccagaggaagcctgtgtagataggtatcaattagataccagctactggaagagctttctcagagactgattaaaaaattctccactagatatggctgcaaattgcacatcctcatggagtctaggagaatcctgcaacagacctgggttggagctgccacggtctatggcatcctcagaaactcaacttggaaatcacgacgtggaccctgagatttctcacgtgaacttcaggatgttcagctgcccgaaggagtcggaccccatccaggctctgaggaaactcactgagctgtgccatctgtggctgaggcccgacctccacaccaaagagcagatcctggacatgctggtgatggagcagttcatgatctccatgccccaggagctccaggtcttagtcatgatgaacggtgtgcagagctgcaaagacctggaggacctgctacgaaataacagaagacccaagaaatggtctgtggtcaccttccacggaaaggaatatattgtgcaggactcagatatcgagatggctgaagccccctccagtgtcagagatgatctgaaagacgtgtccagccaacgggcctcctcggtgaaccagatgcgtccaggggaaggccaggcccaccgagagctgcagatcctgcccagggtccctgcattgtccaggaggcagggagaggactttctgctacacaagagtattgacgtaacaggtgacccaaagtctctgagacccaagcagaccttggagaaggatctgaaggaaaacagggaagagaacccaggactgacatccccagagcctcagcttccaaagagtcccacagatctggtgagagcaaaggaggggaaggaccccccaaaaatagcctctgtggaaaatgtggatgctgacacaccttctgcctgcgttgtggagagagaagcttcgactcacagcgggaacagaggagacgctctgaatctgagcagtcccaaaagaagcaaaccagatgcctcctccatttcccaagaagagcctcaaggagaagccacacctgtgggcaacagagaatccccgggacaagctgggatgaattcaattcattccccaggccctgcgagcccagtcagtcacccggatggccaagaagccaaggcactgccgccctttgcatgtgacgtgtgcgagaagaggtttacgtgtaattccaagctagtcatccacaagagatcacacacaggcgagagactctttcaatgtaatctctgtgggaagcgcttcatgcagcttattagcctccaatttcaccagcgaacccacactggcgagaggccctacacgtgtgacgtctgccagaagcagttcacccagaagtcctacttgaagtgtcacaagagaagccacacaggggagaagcccttcgaatgtaaagactgcaagaaagttttcacctacagggggagcctgaaggagcaccagcgcatccactccggagagaaaccctacaaatgttccaagtgtccaagagccttcagtcggctgaaattgttaagacgccaccagaaaacacatccagaagctacttctcagtgattgcataatccggtctatgccttctgcaccaagaagaagtgaatgatatttttcatcaatgttatcagatgacatttgacacatgcaagggcgtctgacacacagagggagtgccctagatatgaattgccaggatgtttgagtaaatatgtgtcctccccactgagctttgttttctgtttcattatgtccattgttttcttataggtttattttggtttgtgttgctgttcttccaataaacgatcatcttattagttttcaaaaaaaaaaaaaaaaaa

SEQ ID NO: 1388 - DNA, 2453 bp, Homo sapiens
ggcccgcgcccggcctccgcggcgccgcctcccagcccagagcccagcgctcaggaaggtgcgggcgggggagaaagcaacaccattgtttttcaggcgcctccatttgcccccgagccgagccgtggctttccggatgatcgggagacgcggtctggacgggccgggaaaggagccgggcgcctgcggagaccccgcctcagcgagtacgcccggccgggcgggctgggaggatgaggacggctgccctggacttccgccgccacaggagggttttcggccggacgccgggagggagctccaggctgtgagctccatttgtaaaggtcttaataacaagaacagtgacttcggctccggagcttcaagatagtggcctgcttggcctgcccatctcggatctctccaggaggacccagccacccaagggtcgtcttctgctgctgacccccatcaaatcccatcatgcccacagccctgtgcccccgagtcttggctccgaaggaaagtgaggagcccaggaaaatgaggagcccacctggagagaaccctagcccccagggggagcttcccagccccgagtcctctcggcgtctcttccgccgtttccgctaccaggaggcggcgggcccccgggaggccctgcagcgcctctgggacctgtgcgggggctggctgcggcctgagaggcacaccaaggagcagattctggagctgctggtgctggagcagttcctggccatcctgccccgggagatccagagctgggtgcgggcgcaggagcctgagagcggagagcaggctgtggccgcggtggaggcactggaacgggagcccgggagaccctggcagtggctcaagcactgtgaagaccctgtggtgattgatgatggggacagccctctggaccaggagcaggagcagctgccggtagagccccacagcgaccttgcaaagaaccaggatgcccagcccataaccctggcacagtgcctggggctcccaagcagaccaccaagccagctcagcggggacccagttctgcaagatgctttccttcttcaggaagagaatgtgcgggacacacagcaggtgaccaccctccagctacccccgagtcgggtttctccattcaaggacatgattttatgcttctctgaagaggattggtcccttctagatcctgcccagactggcttctatggagagttcatcattggggaggattacggggtctcaatgcctccaaacgacctagctgcccagccagatctctcccagggagaggagaatgagccacgcgttccagagttgcaggatctccagggcaaagaagtgccccaggtctcctacttggactctccaagtctccagccattccaggtagaagaaagaaggaaacgtgaggagctgcaggtgccagagttccaggcctgcccacagacggtggtgcctcaaaacacctacccagctggcggcaacccgcgatctctagagaacagcctggatgaagaagtgaccatcgagatcgttctctccagctctggggacgaggactcccagcatggcccgtactgcacagaagagctggggagccccacagagaagcagcgcagcctccccgcctcccaccggagcagcaccgaggccggaggcgaggtgcagacctccaagaagtcctacgtgtgtccgaactgtgggaaaatcttccgctggagggtcaacttcatccggcatctgcggagccgcagggagcaggagaagccgcacgagtgctcggtgtgcggggagctgttcagcgacagcgaggacctggatgggcacctagagagccacgaggcccagaagccttaccggtgtggtgcctgcgggaagagcttccgcctgaactcccacctgctctcccaccggcggatacacctgcagccggacagactccagccggtggagaagagagagcaggcggcatccgaggacgcggacaagggtcccaaagagccgctggaaaacggcaaggccaaactgagcttccagtgctgtgagtgtgggaaggccttccagcggcacgaccacctggctcggcaccgcagccactttcacctgaaggacaaagcccggcccttccagtgccggtactgcgtcaagagcttcacgcagaactatgacctcctccgccacgagcgcctgcacatgaagcgccgttccaagcaggctctgaactcctactgagcctctccgcctggggcggcctcaccctggctggtgctgccccctcaccttggtactgatcagcgcccccacccaggacataccttccccaggatagagagcacacctccctcctgtccttgctctcaggtagtgagcgttcgggtggtgccatgggagcactctccctcccccaggtaatgaaagagtggccaagtgaaaaaaaaaaaaaaaaaaaaaaaaaa

SEQ ID NO: 1389 - DNA, 3466 bp, Homo sapiens
accattccacgcggctcgagcccgcgtgcgggcctctttcaggccgctcctagtggacgcagaggcgggccgaggacggtgccagcccccaggccccaagaggagctggtccccaggacagaggagggagaggagcaagaggctcccctgggccccttccaggccccacctccaggtcacaggcgcgagatggagtccccaagagggtggaccctgcaggtggccccagaggaaggccaggtcctctgcaatgtgaagactgccacgaggggcctctctgagggggctgtgtctggaggctggggggcctgggaaaactccacggaggttccgagggaggcaggggacggccagcggcagcaagccacactgggggcggcggacgaacagggaggccccggcagggagctgggccccgcagacggtgggcgggacggggctgggcccaggagcgagcctgcagaccgggcgttgcgcccttcgcctctcccagaggagccgggctgccggtgcggggagtgcggcaaggcgttcagccagggctcttacttgctgcagcatcggcgcgtgcacacaggcgagaaaccgtacacgtgccccgagtgcggcaaggccttcgcctggagctccaacctcagccagcaccagcgcatccacagcggcgagaagccctacgcttgcagggagtgcggcaaggccttccgcgcgcaatcgcagctcatccaccaccaggagacacacagcggcctgaagcccttccgctgcccggactgcggcaagtccttcggccgaagcaccacgctggtgcagcaccgacgcacgcacacgggcgagaagccctacgagtgcccggagtgcggcaaggccttcagctggaactccaatttcctggagcaccggcgcgtgcacacgggcgcgcggccgcacgcctgccgggactgtggcaaggccttcagccagagctccaacctggccgagcacctgaagatccacgcgggcgcacggccacacgcctgtcccgactgcggcaaggccttcgtgcgtgtggcggggctgcggcagcaccggcgcacgcacagcagcgagaagcccttcccctgcgccgagtgcggaaaggctttccgcgagagctcgcagctcctgcagcaccagcgcacgcacactggtgagcggcccttcgagtgcgccgagtgcggccaggctttcgtcatgggctcctacctggcggagcaccggcgcgtgcacacgggcgagaagcctcatgcgtgcgcccagtgcggcaaggcctccagccagcgctccaacctactgagccaccggcgcacgcactcgggcgccaagcccttcgcctgcgccgactgcggcaaggccttccgcggcagttccggcctggcgcaccaccggctttcgcacacgggagagcgacccttcgcctgcgcagaatgcggcaaggccttccgcggcagctccgagctgcgccagcaccagcgcctgcactctggcgagaggccgttcgtctgcgcccactgcagcaaggccttcgtgcgcaagtcggagctcttaagccaccggcgcacgcacacgggcgagaggccctacgcttgcggcgagtgcgggaagcctttcagccaccgttgcaacctcaacgagcaccagaagcggcacgggggccgcgctgcgccctgacccgaggacgccctgagcgggaggtcgcggacacacggcattgcggggtctcgggcgtgagtgcgctgtctgctggcccagactttttcgggccgccggtgcgggcgccctcctgctgggagtgcaggggcggccttgggtgtggagaaccctggccgcacagtccctttgacgatagtccaccggccacccaggcctgtctggggacatgtaggatgggctcttaccccagggagggcggcaggctccacttcggcgagaggttcgtccatgcagaggtgggcaagaactggggtctccgacaggtgtggctatttctttgagttctctggcactgtcaaaagcagccaacccaccccccagtccacatggtcaccactgctgctaccagctgctcagtgcagtggccactgtgtctcctaaggtgctcgcttcagtcagcacttcatctcaggcaaccacaggtgacagttaaacatgatgaaaccgcatgctatggctttctagtgtctcatattctgttggcaagaagctcagcactgcattcctgaccgaggtcagaaccagatcaatctcagaatctcacctgtgtaggtctgtttcatgggacttttcttttttgggggagggggcagggtttcactctgtcacccaggctggagtgcagtggtgcaatcactgtttattgcagccgcgacttcttaggctcaggtgatcctcccacctcagcctcccaagcagctgggatgacagacttgcgtcactacacctggctaattttaaaattttttgtaaggacagtgtctcaccatgttgcctaggcgggtctcaaaactcctgggctcaagtgatcctcctgcctcagcctcccaaagcgttgggattataggcgtgagccaccgcacctggccagggaaccttctttataccaagtaccacaccagtcagagtcaagtcaggaaatagaaaccacactaggtatttcaaacagaggggatataagttagggactgattgtgcaggttttgcaaggctcagagagcaaaagtggatgttgcagaatctcagagctggatacttgcaggaagctgctaccacccttagggctggagaacccagggaagctaagaggagggtgcaacgaggctggtgttgggactgccaaaggaaacacagaatgacagctccatctctgcagacctcagatttgaccaggcctctggctgcctgggcagcctcattgccaatgggctgaaaggttctgtcactgttcagtggtctgacttctgagttctgtgcacaccctgagctctgctcctctggcctggccaccagtccttgtctgagtgccccaggtctggttatgacttcaggcctcagcacctggttgtctcttctgcaaagaatgcattctcccccagtccacccagaacacacagcctccatccaggtattggctctgagcaggacagagagcatgcagcaggtgctcagcaatatggaaatgggaccaaacagagggagtctccacagctccccgtccctcacagcagaagccagagccgctgcagtgcccagctggtcttcatcacgtctatgagctctgcaatcgctctgcagtcgcctcaactcctggtctcctctgctccttctcactgcacccgcatctcccatgtttgcactggctgttccctctgcctggaatgctccttacccagttatcccactgtcttctttgcatctggcacacagtagatgctcaataaatgcctgtggaatg

SEQ ID NO: 1390 - DNA, 4359 bp, Homo sapiens
agctcacttccggaccgcggatagcactggcgaccctagcgggtgagaggcccttcagggccgcggcgggttgagcgcaccatcacatctaagccatcagcaagtttgttggttttaatctccaaaatacgtcttgattttgtctgactctttgccaccaccctgatctaagcccttatcatctgcttgaatcactaacttgtctccacttgcagtttttaaaagagttgcttccatttgactttttctgtctgctgtaccagcatatgagtttcaggaggggtcattgatgcagtcattctcagtctcctcggagggagtctgaagatgcttaaagagcatccagagatggcggaagctcctcagcagcagttgggtattcctgtggtgaaactggagaaagagttgccatggggcagaggaagggaggaccctagtccagagacttttcggctgaggtttcggcagttccgctaccaggaggcagctggaccccaggaagctcttagggagctccaggagctctgtcgtcggtggctgaggcccgagttgcacaccaaggagcagatcctggagctgctggtgctggagcagttcctcactatcctgccccgcgagttctacgcctggatccgggagcatggcccagagagtggcaaggccctggccgccatggtggaggacctgacagaaagagcactggaggccaaggcggttccatgccacaggcagggagagcaggaggaaacagcactttgcagaggcgcttgggagccaggcatccagctggggccagtggaggtcaagcctgaatgggggatgccccctggggaaggagttcaaggtccagacccaggtaccgaggagcagctcagtcaggaccctggagatgagacacgggccttccaggagcaagcactacctgttctgcaggcgggtcctggcctccccgcagtgaatcccagagaccaagagatggcagctgggttctttactgctggatcgcaggggttggggccatttaaagatatggccctggccttccctgaggaggagtggaggcatgtgaccccagcccagatagactgctttggggagtatgtggaaccgcaggactgcagggtctctccaggcggtgggagcaaggaaaaggaggcaaaacccccacaggaagacctgaaaggggcgctggtggcactgacatcagagaggtttggggaagcctctctccagggccctgggctcggaagggtctgtgagcaggagcctggtggccctgcaggcagtgcgcctgggcttcctcctccccagcacggtgccatccccctgcctgacgaagtcaaaacccacagctccttctggaagcctttccagtgccctgagtgtgggaaaggattcagtcggagctccaatctcgtcaggcaccagcgaacccacgaagagaagtcttatggctgtgtggagtgtgggaagggctttaccctgagagaatacctgatgaagcaccagagaacccacctgggaaagaggccctacgtgtgcagcgagtgctggaaaaccttcagccagagacaccacctggaggtgcaccagcgcagccacactggggagaagccctacaagtgcggggactgctggaagagcttcagccgcaggcagcacctgcaggtgcaccggaggacgcacaccggggagaagccctacacctgcgagtgtggcaagagcttcagcaggaatgccaatctggcggtgcaccggcgtgcccacactggcgagaagccatatgggtgccaggtgtgcgggaagcggttcagcaaaggggagcggctggtccgacaccagagaatccatacaggggagaagccctaccactgtcctgcctgcgggcgaagcttcaaccagaggtccatcctcaaccggcaccagaagacccagcaccgccaggagccgctggtgcagtgagcatagcaggtggcaggcagcaccatcattcatctttctcactgcagggccttgcggggtgcaaggtgatggctgcaggaaagcactggtcccatcgccttcccacccattcgccaacgcgggaaaggcaaggcctggcttacttagagcttccagagagcatagctgcttccatctcttacccaagtggtgctaaacaatttttcttccaatgtttgagggaagcagtctcctgcggttcagttcaggctgagattttctccttcagtggactgtctgtgtccccctgccgaacaaagctgggagtaaaggcaaaaccttgacacgtgttggtagctgggacctcatcttcctgagggctctgtcttgcctgcagggtcatagctcagactcttcccccaccccctctcttttccattgaacaaacatttattgaacatcctctgagcacctggccgtgggaatgccgtggtgaatgagagactagacgtgatgcctctgggggttgtgcgttggggatgcatgcgacagcccatgacccgaggcattctcagggtatctgtgctgtgtgcccgtgagaacatcttcccatgaccactcctgccctcctgccccgtgctggatcttccctccccagctgggatctgctcccaggcaactgtgtgaattttacattatttggagcctcatctgtgtcaggctataacattctatcctcatctgtaaaacttccccgtccattattccttgcactataacaactgtcaacacaccaactattaggaagttagtattttgctattgatcactgaataaacatcagagtattttaaaaaacagttctctagaaagaactgttataattaaaatgagtctgaaagatgaactctagtattaatgccctatatttgatggcactttatagttcataaaattaatttcaccccattctcattggacccatttcccaagtatttattgaggccctgtaacaaacatgtcaggaactcttctgggtgcttgagacacatccatgaataaaatagggggagaagctgttgacctcgtagagcttatgtctcgtggatgtacctgatcttcagaacccgtggatattcctgcaaatcctctgggcctgtattcattgctttgtcagcatcttgccctgaaatgcatttgtcacctacctcttgttactaaatggtctctgccctccagacccttgtcatccaaggcactaggggtcctggacacccactggggatgatgagctggtagcgacctgttttgcatgagtgccaagtcaggaaaaataaagatatttgtaggcattaaaaaaaaatacatttctttaaaaatgagaagatgcaatatttgtaaactgttgaagcttccttattgtgccatcacttaagggtttcatttctgtttaaagttctggaagctgcataactagcgtggactgactgctgtgtcattgtgctgtgcctttgaaccctggctgagtgagtgagtttgtcctttgttgatagtgtcctataattgcaaaatgtggtttgtcttctgatgcctcttaataccagattcttttactgagatttttttttttcattttccattgtaaataaggtaaatggtaatgactaacacaaagctgtattactcagcccactttgaaacgtggttttatcacctgttcttgttaggcagcatggtgtctaattttggcttagcaaatgacgctccttggtcttcctggctcattagctgtgcccacgaggctgcactgactgggtcgtaaatgtatctgagatgtccacacggggctgctgctgctcctctgtaatactgaggtccacatgcaaaatcagctttttttcccccgtaattatcagagcagctaggcagggctgacagccaggcagactcagtgggaggcttctggcctgagtgtggccttccccagagggtggttttccaaaggcaggtggggactggggaggcctcggggggctgcttgtcattacctgaatcacagatgctcttttgtcatacacagccagcattcctctgggtttcagcaagttggcatatcttaagcttcagaaggagctgggccttgctgactttcctatctggcctcttccctatctcctgtggggccaagagcttaggacagtgtctcagaaaagcctctaagtagggggtttttcccatgggattgtggtagtctgatttttcatatctattcaaatgttaagaaatattttgttttctgtatttttctattctttagaaatttttttataatagataatttcaaacctatataaataaatccttatgtatttatcatttgactttattataaactcataatcaatcttaaaaaaaaaa

SEQ ID NO: 1391 - DNA, 3288 bp, Homo sapiens
accattcttccggtttcagaagttaaggctggtgtcctggccccagtccacctctgggagcgcctgcgccgctccgcggagagtccgtggatctcacagtgaaaaatgtttgctgacccttgacattgacaaactgctgacagctcagatgatccatgattggaaggatgtggtcatcaccaagatgtctttctttctccggttcccagttttccagacctgaagtgttttccaatcaaagcgaagagacgatctgtggatgttgaatatgcaaggagctgaagagagagacattagaagagagacttgtccaggctgggtaaacaagaacaagcctgctctggagcaggatgtctgtaaaattgactcatcagggatagtagtaaagaggttccaagaggatgaataccaagattctacatttgaagaaaaatatgcatgtgagggcatgaaggaaaactctcctagggagattgctgaatcatgccttttccaggaaggaggttttgggagaataactttcatccacaaagaagcaccccctgaaattattagtcaaggatataattttgagaaaagcttgcttttgacctcaagccttgttacacgtctcagggtttctacagaagagagtctgcatcagtgggaaacaagtaatatacaaaccaatgatatttcagaccaaagtaaatgtccaactctctgcacacagaaaaaatcttggaaatgtaatgaatgtggaaaaacctttactcagagctcatcccttacccaacatcagagaactcatactggagagagaccctacacatgtgaggaatgtgggaaagcctttagtcgtagttcattccttgttcaacatcaaagaattcacactggagtgaaaccatatggatgtgagcagtgtgggaaaacatttcgatgtcgatcatttcttactcagcatcaaagaattcacactggagagaaaccttataaatgcaatgaatgtgggaattccttccgcaatcactcacatctcactgaacaccagagaattcacactggagagaaaccttataaatgcaataggtgtgggaaggcattcaatcagaatacacaccttattcatcatcagagaattcacactggtgagaagccttacatatgcagtgaatgtggctcttcttttcgaaaacactcaaatcttacgcaacatcagagaattcacactggggaaaaaccccataaatgtgacgaatgtgggaaaactttccaaacaaaggcaaacctctctcagcatcagagaattcatagtggagagaaaccctataaatgtaaagaatgtggcaaagccttttgtcagagcccatctcttattaaacaccagcgaattcatactggagaaaaaccatataagtgtaaagaatgtggcaaagcgtttactcagagcaccccactcactaaacatcagagaatacatacaggggagagaccctacaaatgcagtgaatgtggtaaagccttcattcagagcatttgccttattcggcaccagagaagtcacactggagaaaaaccctataaatgcaatgaatgtggaaagggctttaatcagaacacctgcctcactcagcatatgagaattcatactggagagaagccctataaatgtaaagaatgtgggaaagcctttgctcatagctcatctcttactgaacatcatagaactcacactggtgagaagctctataaatgtagtgagtgtgagaaaaccttccgcaagtatgcacaccttagtgaacattacagaattcacactggtgagaagccttatgagtgtattgagtgtggaaagttcttcagacatagttcagtccttttcagacatcagaaacttcacagtggtgactaatgctgccatttaggttatgacagtttctctagcgaggatgactacgaatctgactgggagtagaggggcaggtagagttcctggagggaaggatgaaggagccttggctactgtactctgagaggaatgtttccagaaatggaggtgggagcttagggaatgcagagcctacttgaggtgggcatctgggaatacagggtagaaagaaattcctgcttttcagataaagcctacacattgccactgtctccccatgtgactcttacagcttgaggaggcatttgttagcacttctgttcactttactacatcctgccccacattctgacttgtcacccattttcgttggctggcaggttgagatgtttttcttaaacactgcctgtcagtgtgaagtggcacagctctgatgtagtgctaagtctagcctccagatttgaggcagccctgaccatgctaccatgggggaggctcccaacctgtggaagtggtcctgtgaaaaggagacagaaacaagtaagagccaaaaaaaaaaaaaaaaaaaatccatatccattcattaaaaaaatgagatataaagcaacaactgggctgacctctatagatctgccagtaaagaaggctttctttcattatcagggtgaaggtctttcctgattcttccaagctttgaggtgactcagagctaagaatgaaataggagaccaagttagaattcatgatactggtttatggggaggcagtcatacctgttcagagaaccaggaagactcaatatctatctcagaggaaatatggttacccaggaaagaaatggtctgctagagtgataagactcagaacaggaagcctgcatgtgactgagcaagtcacctacataaccctgcctgtactaaggtgtacacctgtctattgtaagtttgcctaggctgttggtgtacagagaccagaggagagagacacactaggactaacaatgtcctaacaaaatggtacttagtttgttggtctttaggagaaagcattagtaatgaaagaagaaagaattttcacttggttggacattggggctgcttaagaaagttgacatttgtcgtggaatgactttggaaagacttctaaaagaatctttttcaaatccctgaaaatcaggatagcacattttgctactgactgtgacagtgttttattcttttgagagaaatgacatagttttccctttatttcccaaattcctttcatgttcttaactgctacccagaaattgagcttcagaagattgaggatagcctttgattggtatttaaaataatttctaagctgtgaagcttatagcatttttaaagtatggctattaaaaacactaagttgattctggaaaaaaaaaaaaaaaa

SEQ ID NO: 1392 - DNA, 3198 bp, Homo sapiens
gctggacacgcagcggctcgcatcgcagagcgcagcgccggcgcggggccgcgagaacgcagcgcaggggagcagcccgaggcggacaccgcgagccgcccggcactcccgcagtccagccggctcctctagcccggccacggctccgctgcgggccacccaggattactcgcgtctggctccaggcgccgagaaggcgcgctgggcgcccgtggccgccgcgccagctcctcctcctcccgctgctcctgctcccggggcgagcgcgcagccccgagcccgccccgcgcctcccggagccctcccccccgctgctcccatgcgcgcgggtgggtcatgagcacagcgccctcgctttctgccctaagaagcagtaagcacagcggcggcggcggcggcggaggcggaggcggcggtgcagaccctgcctggaccagcgcgctctctggaaatagctccggccccggcccaggctcgtccccggccggcagcaccaagccttttgtgcacgccgtgcccccctctgaccccctgcgccaggccaaccgcctgccaatcaaggtgctgaagatgctgacggcacgaactggccacattttgcaccccgagtacctgcagcccctgccttccacgccggtcagccccatcgagctcgatgccaagaagagcccgctggcgctgttggcgcaaacatgttcgcagatcgggaagcccgacccctcgccctcctccaaactctcctcggttgcctccaacgggggcggcgcgggcggtgccggcggcggtgctgcgggcgacaaggacaccaaatcgggccccctgaagctgagcgacatcggcgtggaggacaagtcgagtttcaagccgtactccaaacccggctcggataagaaggagccgggaggcggcggtggaggcggtggcggtggcgggggcggcggcgggggtgtttcgtcggagaagtcgggattccgggtaccgagcgccacctgccagccattcacgcccaggacaggcagcccgagctccagcgcctcggcctgctcgccgggaggtatgctgtcctcggccgggggtgccccggagggcaaggacgacaagaaagacaccgacgtgggcggcggtggcaagggcaccgggggcgcctcggccgaagggggacccacggggctggcacacggccggattagctgcggcggcgggattaatgtggatgtgaaccagcatccggatgggggcccgggaggcaaggctctgggctcggactgcggcggttcatcgggctccagctccggctccggccccagcgcgcccacctcctcctcagtgttgggctctgggctggtggctcccgtgtcaccctacaagccgggccagacagtgttccctctgcctcccgcgggtatgacctacccaggcagcctggccggggcctacgccggctacccgccccagttcctgccacacggcgtggcacttgaccccaccaagccgggcagcctggtgggggcgcagctggcggcggccgcggccgggtctctgggctgcagtaagccggccggctccagccctttggccggagcgtctccgccgtccgtgatgacagccagtttgtgccgggacccttactgcctcagctaccactgcgctagccacctggcaggggcggcggccgccagcgcttcttgcgcacatgatccggctgctgcggctgcggcgctgaagtccggatacccgctggtgtaccccacgcacccgctgcacggtgtgcactcctcgctaacggccgccgcggctgctggcgccacaccgccctccctggccggccaccccctctacccctacggctttatgctccctaacgacccactcccccacatctgcaactgggtgtcggccaacgggccgtgcgacaagcgcttcgccacgtccgaagagctgctgagccacttgcggacccatacggcatttcccgggacagacaaactgctgtcgggctaccccagctcgtcgtctctggccagcgctgccgcggccgccatggcttgccacatgcacatccccacctcgggcgcaccgggcagccctgggacgctggcgctgcgcagcccccaccacgcgctgggactcagcagccgctaccacccctactccaagagcccgcttcccacgcctggcgcccccgtgccggtgcccgccgccaccggaccgtactactccccctacgccctctacggacagagactgaccaccgcctcggcgctggggtatcagtgagggcggccgggagggcgagcgagggagaggagggagagggggaggggaggagtccagggagaggcgggatcacggcccaggctgctgacacccgcgcgtggggaggactcgggccacgaaaggaaagaaatgtataccgtatctatctacccgacagcagcgaccgagacccggtgggacactccccttctccccactttcacctccccacccaaactttataaaagttgaaaaaatatcatttgactttttatagaaaaaaaaaggaaaaaataattgagaaagtgttcatctgaggactgcatcggtggacactggtatttatttatgttagctccaagcggaccggtggttcaaaagtgcattatttagtttgagctctgtaggtaaaaaggaggtgggaaaaattttaaaacttgagggtaaaaatgtggaaaacaaaccctcccatcccttgtagattataaataaaagcaaaaccgccacagaactagaggtcttctctttaatgttactttaaaattgctatgattgtattgtacgttatttaatgtctgattgaaacacaaatttacatgcatgtttgttacaaaaaaaatgaaaaaaaaagtcacaatttgtcagctctgatttcaaattgcaattatttttaaggtgtataccatcgaagagaatgggtatttttttgtatgtattctggaagaaaacaacaaaaaaaaaaagaaaaagaaaaaattctattccaaaacctcatttgccttattttgttctttaaaaggaacacttaactatttttaatttttaagtccacccgctgagaaggggacaaggtttacgtcatgtactaaaataatagacaatgtatcgctttaaagattaaaattccgtatatttgatgtattaaaaaaaaaaaaaaaaaaa

SEQ ID NO: 1393 - DNA, 2960 bp, Homo sapiens
agtggaagtgacgccaacggaagcaggaaggcggttccggcaagccaagggggcgttgtcgtgatgattccgcggccagcggatcgctgcgagtggccttgaaggcagctgctgcaggtgaagagtaggcggcggggcagagagcggcctccgagggtcacctgaatggttgagcatggaccctgttgctacccacagctgccatctgctccagcaactgcatgagcagcgaatccaaggcctgctttgtgactgtatgttggtggtaaaaggagtctgctttaaagcgcataagaatgtcctggcagcattcagccagtattttaggagcctctttcagaattcttcaagccagaagaatgatgtttttcacttggatgttaaaaatgtcagtggcatagggcagatcctggacttcatgtacacttctcatctagatcttaaccaggacaatatacaagtaatgctggacacagcacagtgtttgcaagttcaaaatgttctgagtctgtgtcacacatttttaaaatcagccactgtagtacagccacctggcatgccttgtaatagtacattgtctctacaaagcaccctgaccccagatgccacttgtgttatcagtgaaaactacccccctcatttactgcaggaatgttcagcagatgcacagcagaacaaaacgttggatgaatcgcatccgcatgcttcaccatcagttaatcgtcatcactccgcaggtgaaatctcaaaacaagctcctgatacttcagatggcagctgcacagaactgcctttcaaacagccaaattactattacaaactcagaaacttttacagtaagcagtaccataaacacgcagctggtcccagtcaggagagagttgttgagcagccttttgctttcagcacctctacagaccttaccacggtagagagccagccttgtgccgtcagtcattctgaatgcatcctggagtctcccgagcacttaccttccaacttcctggcccagcctgtgaatgactctgccccacaccctgagtcagacgccacatgccaacaacctgtcaagcagatgaggctcaaaaaggccattcatctgaagaagctcaatttcctgaagtcacagaaatacgcagagcaagtatctgaacccaagtcagatgatggtttgacaaagaggttggaatctgctagtaaaaataccctagagaaagctagcagccaaagtgctgaagaaaaagaaagtgaagaagtcgtcagttgtgagaattttaattgcattagtgagacggagaggcctgaagacccggctgccctggaagaccagtcccagacacttcagtcccagagacaatacgcgtgtgaattatgcgggaaaccttttaaacacccaagcaacttggagcttcacaaacggtctcatacaggtgagaaaccttttgaatgtaacatttgtgggaaacatttctctcaggcaggtaacttgcagactcacttacgacggcattctggtgaaaaaccatacatctgcgagatctgtggaaagaggtttgcagcctctggcgacgtccagcgtcacattattattcactcaggagaaaaaccacacttgtgtgacatctgtggtcgagggtttagtaacttcagtaatttgaaggagcacaaaaagacacacacggctgataaagtcttcacctgtgatgagtgtggaaagtcttttaatatgcaaaggaagttagtaaagcacagaattcggcacacgggggagcggccttacagctgctctgcctgcgggaaatgttttgggggatcaggtgacctccgcaggcatgtccgcactcacactggggagaagccgtacacatgtgagatctgtaacaagtgctttacccgctctgcggtgctccggcggcacaagaagatgcactgcaaagctggtgacgagagcccagatgtgctggaggagctcagccaagccatcgagacctccgacctcgagaaatctcagagctcagactctttctcccaagacacgtctgtgacgctgatgccagtgtcggttaaactccctgtccacccagtggaaaattctgtggcagaatttgatagccactctggcggctcctattgtaagttacggtccatgatccaacctcatggagttagtgaccaggagaagctgagtttggatcctggtaaacttgccaagccccagatgcagcagacacagcctcaggcctatgcttactcggatgtggacaccccagccggtggcgaaccactgcaggccgatggcatggccatgatccgttcctctctggctgctttggacaaccacggcggtgaccccctgggcagtcgagcatcttccaccacttataggaactcagagggtcagtttttctccagcatgactctctgggggctagcgatgaagacgctgcagaatgaaaacgagttagaccagtgatgtaccgcgcttctccacggtagaggcgtgttctcagtttagcaggctggtgttaaggctgtaggaggacccagtttccccatgacagtgccttctaactagccagagaataggtagcttccctcctgatgatggctcataatctgaagcatcttgagctgggggtgtgagggggagggcctgctggctcaccgtgaggcagccgcgggagggagcgctgacgtcacagaagcgaaggcttgatgctgtctcagcagcctcagctgtgggggggaagcgcgtgtgcatcgtgtcaactactgtacatgttggtcatgtgaaaggaattatatatgtatagtattacaagtatttttgcatttttacaagattgaaatttgtagcattttgtattatttacacagaatttatttgtatatgaaactcataccataatttaattcgaataaatgaaacttttctatatattaaaaaaaaaaaaaaaaaa

SEQ ID NO: 1394 - DNA, 2148 bp, Homo sapiens
ccatgaatggaagcggcggcggcggcgggagcggcctgagctgggcgccggggccagggccgggggctgcccagggcccgcgccgctgcatgggggcggcccgcgggccctgagaggaagggcagacaggcgggccgagataggaggggcggggtcgggcggccgcaggccggaggcgcgtcgggctggagccggtcacgatgccccgaaggaagcaaagccacccgcagcccgtgaaatgcgagggggtcaaagtggatactgaagactccctcgacgaaggacccggggccctggtattggagagtgatttgctactaggccaggatctggagtttgaggaggaagaggaagaggaggaaggcgacggcaacagtgaccagctcatgggcttcgagagagactcggaaggagactctctgggggccaggcctgggcttccctatgggctgagcgacgatgagtctgggggcggccgggcactaagtgcggagagtgaagttgaggagccagccaggggtccaggggaggccaggggtgagaggccaggcccagcctgccagctgtgtggggggccgacaggtgaggggccgtgttgtggggcaggagggccgggtggggggcccctgctgcccccacggctactgtactcatgccgcctctgcaccttcgtgtcccactactcgagccacctgaagcggcacatgcagacacacagcggagagaagccgttccgctgtggccgctgcccctacgcctcagcccagctcgtcaacctgacacgacatacccgcacccacactggcgagaagccctaccgctgtccccactgcccctttgcctgcagcagcctgggcaacctgaggcggcatcagcgtacccacgcagggccccccactcctccctgcccgacctgtggcttccgctgctgtactccacgaccagcccggcctcccagtcccacagagcaggagggggcggtgccccggcgacctgaagatgctctgctccttccagatttgagcctccatgtgccaccaggtggtgccagtttcctgccagactgtgggcagctgcggggtgaaggggagggcctctgcgggactggatcagaaccactgccagagctgctattcccttggacctgccggggctgtggacaagagctggaggagggtgagggtagtcggctgggagctgccatgtgtgggcgctgcatgcgaggagaggctggagggggtgccagtggggggccccagggccccagtgacaaaggctttgcctgtagcctctgcccctttgccactcactatcccaaccacctggcccggcacatgaagacacacagtggtgagaagcccttccgctgcgcccgctgtccttatgcctctgctcatctggataacctgaaacggcaccagcgcgtccatacaggagagaagccctacaagtgccccctctgcccttatgcctgtggcaatctggccaacctcaagcgtcatggtcgcatccactctggtgacaaaccttttcggtgtagcctttgcaactacagctgcaaccagagcatgaacctcaaacgtcacatgctgcggcacacaggcgagaagcccttccgctgtgccacctgcgcctataccacgggccactgggacaactacaagcgccaccagaaggtgcatggccacggtggggcaggagggcctggtctctctgcctctgagggctgggccccacctcatagcccaccctctgttttgagctctcggggcccaccagccctggggactgctggcagccgggctgtccacacagactcatcctgaactaggtccttcttccccatgttttatacagacggaccagaagccacctttttctcccccgctggccaggggctccacacagactaacgtaggcactataaggaccagcccaaccccatgggcgggggggcccatatggaccaggggaccttgccttgactgaggcacttcacgagctcagtgagaagggccctgtattcacctccactgcccccaggggctgtggacaaaccggctgggggactgcccagcctcccacctgtttatttaacttatttcagtgctttataataaaggaaacactaacaaaaaaaaaaaaaaa

SEQ ID NO: 1395 - DNA, 3204 bp, Homo sapiens
acagagctgggtgtgtccctccgagtgccccccgctagggactgtgcaggccggagctaggcagggacagcggggcgaaccgggctgatagagtcggtccctgctcctgtgaggctctcaccgaatccctgctgtttccgggcagctgaagagcgctgggccctcgcgtcgcgggcgtggctgtggccgtgtctcctggtagtctgagcccactgtgcgtgtggatccacgtgggagctgggttccagagcctggtcctgaggaggagccgagccggggcttccccttctcagaatcctgctcttcctccagagagattcccaggagaagagggaacaaccaattcattcctgaaagccaggcctcgggacctgatgacatttgaagatgtggctgtggaattcagccagtgggagtgggggcagctgaaccctgctcagaaggacctctacagggaggtgatgctggagaacttcaggaacttggccattctgggccttctagtatccaaaccatatgtgatctgccagttggaggaagggggtgagcccttcatggtggagagagaaatctcaacaggagcccactcagactggaagagaaggtctaaatccaaggaatcaatgccaagttggggaatttccaaagaagaattattccaggtagtatcagtggaaaaacacattcaagatgtgctgcagttctcgaagttgaaagcagcctgcggttgtgatggccagttagagatgcagcagataaaacaggagagacacctgaaacaaatgtcaaccattcacaaatctgccaccacccttagcagagattataaatggaatggatttgggagaagcttaggtttaagatcagtccttgttaaccaacacagcattctcatgggagaaggatcttataaatgtgatacagaattcaggcagactttagggggaaacaactctcagagaacccacccagaaaagaaatcttgtaaatgtaatgagtgtgggaagtcctttcacttccagtcagaacttaggcgccatcagcgatgtcacactggagaaaagccgtatgaatgcagtgactgtggaagagcctttggtcatatttcatcccttattaaacatcaaagaactcatactggagaaaagccctatgaatgcagtgaatgtgggagagccttcagccagagttcgtctcttgttctgcactatagatttcacactggagagaaaccctacaaatgtaatgaatgtggacgagcctttggtcacacttcatcccttattaagcatcagaggactcatactggagaaaagccctatgaatgccgggaatgtgggagaaccttcagccagagctcatcactcattgtgcattacagatttcatactggagagaaaccttacaaatgtaataaatgtgggagagccttcagccagagttcatctctcactcaacattacagatttcacactggagagaaaccctacaaatgtaatgagtgtggaagggcctttgctcatactgcatcccttattaaacatcagagaagtcatgctggaaaaaaaaccctataaattcagtgaatatagaagggctttcagctggagtgcagacatcactggaacttaaagaattcatatcagagagagatcctaaaggtgtaatgtatgtgggaagaccacatcttgttccacatcaggcaataattactaaagagaatccctgtcaatgtcaagagggggtgggcttcccctctcttaccaaacatgggagaatccatactagtgagaaaccacgtgaatgtaatgaatgtgggaacgctttgatcagaggatgcatattattcagcatcagacagccgacactggggaggagccttatcaatgcagtgagtgtggcaagccttcagttacatactgattctttaagaaaatcagataacttgtactggagagaaatcctacaagtgtggtaagtatggaaaaatcttcagttgtatctcttcctttactaagcatcaagaacacatactagagagaggccctatgaaagcaggaaatagaggaaggccttcagtcagggctcatcccttattaagcatcagaaaattcatacctgagaaaaacctgtgaatgtgggtaatgtgggagagccttcagccaaacctcattgctttataaaccccttagaactctccctactagctggaaactctggtgacgtgatgaatgtgggaagggctttggtggatgttccaccaaaacacgttagagaatttgtacattagagaatttgtgctagagcaactcttcaaatttagtgaaactgggaaaacccattagtagagttcaagcttcagtattcatctcaaagagaaaccttgggaacatgatgaatgtgaggaaagttcctttccaacttgagatgtataaaactagagctgaaaagaagctgagaaatcaccttgtctggtgattttctgcctggtggggccatttgtataacgacacttgtgcattgcctcctcatgctgttactgacggggcagggtgtcatgcatgggtgcagaggatggaggctgagaaaggtagacagctacccatgatctagcccagtcgtattttagagctaataaaactgatgttcagaaagtgacatgccttggcctatagtcctaactgggctgggcctctttcctgtggttcacagctgtagtatggagattaatagacaggatctttgcagtacaacacctctatgcacttctttctctgtagcacatgttacctttctttgtgaggcaatggagtggtctaggattgagcaaaaagcaatttttgttacatctttatgctaatagatttggaatttttgaaatgaaatgaaaccttgtttaaacattaaaattactaaaataggctgggcgcggtggctcacgcctgtaacctcagcactttgggaggccgaggcggacagatcacgaggtcaggagttcgagaccatcctggctaacacagtgaaaccctgtctctcctaaaaatacaaaaaaattagccaggcatggtggcgggcgcctgtagtcccagctacttggaaggctgagacaggagaatggcgtgaatcggggaggcagagcttgcagtcagccgagatcacgccactgcactccagcctgggagacagagtgagactccgtctcag

SEQ ID NO: 1396 - DNA, 6810 bp, Homo sapiens
aatcaggcgcgcagccagggaggaaggggcggcttccggaatctggcgcggcctttgtctcacttcagccagagcgcggggttagggcttcattgccttgtgtcctctgctccgggagacttcggtgattctgccactcactccgtcgctctgtgacctgctggcattgaatgatttatagctaagactccaggacacccctgaagccgagaaatggaactcttaacattcagggatgtggccatagaattctctccagaagagtggaaatgcctagaccctgcccaacagaatttatatagagatgtgatgttggagaactacagaaacctcgtctccctggctgtgtattcttattacaaccaaggcattttaccagagcaaggcatacaagattcattcaaaaaagcaacactgggaagatatgggagctgtggccttgaaaatatatgcttatggaaaaactgggaaagtataggtgaaggtgaaggacaaaaggaatgttataatctatgtagccaatatttgacaactagtcataacaaacatttaactgtgaaaggagacaaagaatatagaatatttcagaagaagcctcagtttctgtcagctgctcctacagaaccatgtattcctatgaataaatatcaacataaatttttgaaatctgtcttttgtaataaaaatcagataaattttaaccatgactcaaatattagtaaacatcatagtactcattttctagaaaactattacaattgtaatgaatgtgaaaaagtattttaccaatcctcaaagcttattttccctgaaaatatccatattcaaaaaaagccttacaactctaatgaatgtggtgaaacttctgacccattctcaaagcttactcaacatcaaagaatttatattggagagagctcacaaagatgtaataaaaaatgtataatagtctttagtcaatcacatctaaagggacataagataattaacactggagaaaaatcagtgaaatataaagaacgtggcaaagcttttaccaggggcttacatcttggacatcagaaaattcatactggagagaaaccttacaaatgtaaaaaatgtgacaaagcctttaacaagagttcacaccttgctcaacatcagagaatccatactggagagaagcctttcaagtgtaaggaatgtggcaaagcttttaacagaggctcataccttactcaacatcagagaatccatactggagagagagctttcaaatgtgaagaatgtggcaaagcctttaacagggggtcataccttactcaacaccagagaatccataccggagagaaacctttcagatgtaaggaatgtggcaaagcctttaatagaagctcatacgttactcagcatcagagaatgcatactggagagaaacctttcaagtgtaaggaatgtggcaaagcttttaacagagcttcacaccttactcaacatcagagaatccatactggagagaaacacttcaaatgtaaagaatgtggcaaagcctttaacaggggctcacaccttactcgacatcaaagaatccatactggagagaagtctttcaaatgtgaagaatgtggcaaagcttttatctggggctcacaccttactcaacatcagagagtccatactggagagaaattcttcaaatgtaaagaatgtggcaaagcttttaccaggagctcacaccttactcaacatcagagaattcatactggagagaaacctttcaaatgtaaagaatgtggcaaagcttttaacagacgctcaacccttactcaacatcaaataattcataccaggtagaaaccctgcaagtgtaaagaatgtgctaaaaccctaaactggtgctcacaccttactcaacattagaaaatcaatactggatagaaatcccatatgtgtaatgatttttgaaacatcaaaatgaagattaaataaaaattagaagtgtcactttagaaagaactaaggtgctagcacttccgtaaattactctgaatcagtgtgtttattataacaaataattcaaactcaattagataattaaattgtatgtttaaaaagagggacgacattgatggagaggcataattatattcaatgttcacttatttttgtaatcacagtattcatgattgagaaagtattattgatgtaattaaattcaaattaaccttttttttccccactgtggttgattattgctgtctctgacatgagagtcccttctacgttaggtaggcatcattcacatgtctcattcacatgtcatcattcacatgtctcatgacgtcattcacaagtttcccatggaagactaagagcattggcatataggatgtatgatgaaatctaaatggagttgctctttttgtttgacttacaacactgaatataagtcatatatgagttaggtgttcagaatattattgttctgcattaaagtgtgagacagaaacactctgagttttagatatgaatagttttaccaactacccattaaaaggtcttgctagtccattaatattctaatgtatcttcatagcagcaagttagaagtcctgaatgttactgtgataacaataaagaaatcacaaatatcagagagtggtgcaaataacttctctctggtagaacatagattattaattcaatcctctaaatacttaggctcagtttaagaaaagagagaacacatttttttaacataggtcatggtatcagaataagaatgctttttgaatgtttgcagtctgtaattttgatgattgaggaaactggattttgaaatgctttattcagtctgtaaacttaatttttttttaagaataaaatgaaatgtcttttaatttgttaacactgttgcttattgaataatgtcttatcctgacaaaaatgttaacttattccaccttgctcaagattccaggtagtaaatggtaatgatatactatcgggtatgtctagttcatgctgtctttagcatttttttacccttagtggtattaaactccaaatagtttggagaatgttgattccataagttattacttgttactctaacaagttccccaaggtgtgttgagtagttaattagcccttagctatttttaccaaacattaggttattaatttaaaattgtttgtttttaatgtaggtgtttactgctatgaatttctctgaacagtttgctgcatctcatgtttcgatatgtcataacttcattttcatttatctgaaaatattttccagtttcattttttctttaacacattaattaggagtatttttaatttccatatatttgtgagttccccccattttctgcattcatttatttttaatttccttttactaaagtcagggaaaatactttggattattttgatcctgttaattttattgacgttttcctgctgtatggcctagcatatggtctatcctggagaatgatttatgtgtacttctaattttgagtggaaaattctataaatttgagaattctatcagttcatatttgtttacagtgttcaagtgttatgttttcctgttgatcttcccactttttctgcccattatttacattggagtatagaagtttctatacttctgataaactccaaataatggatttgattatttaatctatttatagcctgtaatattatcagtatagttgaatttgcatcattttgctttctatttttatgtctcacgtatttttctttattcttcctttactgctttcttattactttccatataatcttttaatttatataattgttcatgtttttgaagttacttccttgttttctctagcccttatataccttatcagaatctgctttatatttatattaattccaatgagatataaaatattaccactatatagcttttttcccccaatttggattgaatttttaaaatattgtcttaatttagttttattgttttattaaaaaagctaaacttaacaaaattggttgtatattagtttaggtgaggttgttttgtaatgagaaaataatttacaacatatagagaataaattattattattttaaaaagtactctacattttgtatccttaccatttcctttgatagtttaaaattgtaattctctaaataagagatatattcataaatgtgacttgtaaatgttgaaatttatatgtttgctttttctgcattcagtaagggtagtagtttccagcatctgtgcctctttaaagtgaaagacaggggcaggcgtagtggctaatgcctgtaatcccagcacttcgggaggcccaggtgggtggatcacctgaggtcaggagttcgagactagcctagccaacttagtaaaaccctctctctaccaaaaatacaaaaaattagctgggtgtggtggtgggctcctgtaatcccagctacttgggaggctgagacaggaaaatcacttaaacctgagaggtggaggttgcagtgagccaagatcatgtcactgcactgcagcctgggcagcagagtgagactccatctctaaataagtaaattcagcctgggcaacatgtgagactccatctctaaataaataaataaatgaatgaatgaatgataggatggaattaaaatagtttgaaaacacaaattaacaaaatggtgttgacaaagattgttcatttgtggtctaccagggcataaaattctcaaaaaacataatcagtaggaaacctctttattcctgaatattagagaatattatatgtcttaaaattattcatgttgaaaagctctgcctttcatgcatttaggagaaaaagtagagggcaggaggtttatgtagactctggtctgtgcctgatttggggaatggaaagactcgacagaagaggccaggtcagccaagcagggctctgttgcgtgcaagattaactgctggtttgtctttgcagagctccacacagaacatcatcaaagaactgatggacacttcatctccctgggtgaggggcaggtgtaccatgctgtcatggccattcctgcctcgattggggtgtgggtgtagagatggtctctataaccagggcccagacatggctgagaaggccttctgccaggactccaccttgatgactcacaggactttgtgccttggctttccctattgagtgacccacagttttaatccaagggaccctgagtctgtttccttccttcagccccaccatttcaccccagcactgttcaggtgtacaatcggctttcacatatttgtaagaatatctaggaaaattatttatattttactttcacttcatgttatgaccatgagtgtttttgcatttgctagggctcattgttttaattggcccccctttatccctctgagtgcggaaataaatcagccctaaatctggatgagacctgcaggtggactccatcagtgcaggcgtggtggggcagcaggaggagcccgtggtgcccaccttccagagctgccacctcttttacctcctcatgttccttcctgtgcacctagagagagttcacccccacccaacagctcctggacctgctgcccaaaaggtaagtgctccatccctccacagcacaagggggactcagccacctattatctgtgtcttgggaaagtcccttcacatttgtgggcttcagtttgcttctttggaactggggttctaagaagcctaacatgatatgattgtttcaagaactaaatgagataagctatggaaagtacttcagacttggccttgtagaaagcactgctgagggaatagattggttattcatattataaaactatttaaaactctagaaaactatagtaagatataagattataaaaatatcaaaactaagatattgacagtaatagaattaacctactcatctatttgcattttaccagattaattttttcttatgtgtgtgtgttctgtgcaattttattacatgtgtaggttcacctaccagaagattaactcgttttcctcttataaccacatccgcttcccttctccccaccatacccactctgattctgattctttgaaaccattaatttctatttctgcaaatttgtcattccaataatgttatataaatgaaatcataacctgtgcaaccttttgtaattggcccttttccttcagcataattccttggagattcatctaaattggtttatgttttagtttgttccttttgttattgctgtgggttttcatgtgtggatgttaccatgaaatactgtgtgtaacccttcactctttcaagaacatatttgttgttttcagtcagtgtgtggctattatgaataaaagtgctatgtacattcatgtactaggtttcatatgaatacatgttttcattactctggaaaatatttccagcatacaattcctggctcatagggtagttacaagtttaattttaatagaaactagcactctgttatccagagtgactatcattttacattcccatcatcaatgaatttctgttttttcaaatcctcttagccatactgactgatatgtattgatatcacattgttttaatgtacatttttctaaaggataataatgttgaactttatttaatgttctcatatgacatctgcctattatctctgatgaaatgtttattcatgtctgcatgttttctaattgtatttgttttcttgcaagttttgagagttctgtttatattctggttactagctcacataggcaataaataagttttttttccacaaag

SEQ ID NO: 1397 - DNA, 3995 bp, Homo sapiens
agccgattgcagggagaaactgttttcgcagcagtgcgcctcccttttccagccaccggttctcctgaccccgagtgtggggggtgacttcagtctcctgacatccagtgttctctcgagccagtttccagcccacagaaaatgagctcttccggaagtgggcatcttattccaatcccctccctgtgaatgtgtggagaaaaagagatgggaacgaggcagaggaaatagagaaattttgaaagagaaatgaagaatgagagacccattaacagaaggcaaagtagaaggttcacaaattttaagaaagggagaataaagtgaaaaaaatctcagaaggaatccactcaacagacgaggattcacttccaaagagacatattatgcaaggaagcaacttggaagaggaaagaaaagaagtcaggaatggcccttactcagggacccttgaaattcatggatgtggccatagagttctctcaggaagagtggaaatgcctggaccctgcgcagaggactttatacagggacgtgatgttggagaattataggaacctggtctccctgggaatctgtcttcctgacctgagtgttacctccatgttagagcaaaagagagatccctggactctgcagagtgaagagaaaatagcaaacgatccagacggcagggagtgcatcaaaggtgtgaacacagagaggagctctaaattgggaagtaatgcaggaaacaagccttgtaaaaatcaacttggattcacttttcagttacatctgagtgatctacagctatttcaagctgaaaggaaaatttctgggtgtaagcattttgaaaaacccgtcagtgacaattcctcagtttcaccgcttgaaaaaatttcttccagtgtcaaatcccaccttttaaataaatatagaaataattttgatcatgctccattacttccacaagaacagaaagcacacattagggaaaaagcttataaatgtaatgagcacggccaagtctttagagcatctgcaagccttactaaccaagtaatccataacgcagataatccttacaaatgcagtgaatgtggcaaggtctttagttgcagttcaaagcttgtgatacatcgaagaatgcatactggagagaagccttacaaatgtcatgaatgtggcaagctcttcagtagcaattcaaacctttcacaacatcaaagaattcatactggagagaagccttacaaatgtcatgaatgtgacaaggtctttcgaagcagttcaaagcttgcacaacatcaaagaattcatactggagagaagccttacaaatgtcatgaatgtgacaaggtcttcaatcaaattgcacaccttgtacgacatcaaaaaattcatactggagagaaaccttacagttgtaataaatgtggcaaggtctttagtcgccattcatatctagcagaacatcaaacggttcatactggtgagaaaccttacaaatgtgaagaatgtggcaaagcattttcagtgcgttccagcctcataacccatcagttaattcacactggaaggaaaccttacaaatgtaaagaatgtgacaaggtctttgggcgcaagtgtttcctgacctctcatcagagaattcatactagagagagaccttatggatgcagtcagtgtggcaagatctttagtcagaaatcagaccttatacgacatcgaaaaactcatactgatgagaagccttacaaatgtaataaatgtggcacagcgtttagagagttttcagaccttactgcccattttctaatccatagtggagagaaaccttatgaatgtaaagaatgtggcaaagtcttcaggtacaagtcttctctaaccagtcatcatagaattcatactggagagaagccttacaaatgtaacagatgtggcaaggtcttcagtcgcagttcaaacctggtatgccatcagaaaattcatacaggagaaaagccttacaaatgtaatcaatgtggcaaggtctttaatcaagcatcataccttacaagacatcaaataattcatactggagagaggccttacagatgtagtaaatgtggcaaagcatttcgagggtgttcaggccttactgcccatcttgcaatccatactgaaaagaaatctcatgagtgtaaagaatgtggcaagatcttcactcagaagtcttccctcaccaatcaccatagaattcacattggagagaaaccttacaaatgcaccctgtgcagtaaggtcttcagtcacaattctgaccttgcacagcatcagagagttcattcatgagagtccctacaaactgtatggcaaaaccatcatcatgagttctagcattaatcaacatcagtgagtccatactaagtggaaatcatataaatgaaatgtatgtgacacaggctttatcaaggcctgccaaatcactggacatcaccacatcactgtggaggatgaaagcacacagatgaattgtgtgtacttgggctattattcaaggaccattgctatagaacacgataggatttacacaagaagtaactctgtctctggttctctgatactaatctatgatattgcatgatgcagaataatgctaagtcaaaatatgttgaatctcatgacctgatgtatatcaaaggtgcaacggcttgtaaatgaccagttttattcaggctataaagcattcaattatttggggcttatagaaaaggctactttactctttgtgacttcgaaatcttttcatgtgccttccatacaggccattcactgtggtccctgggaaagaatcagtaggatgacagggctgacttcattagctgaggattatttctatccaatttcctgatgaaggacattgccttttgagattaaatattgtctgatttagagagcatggaggtgggcagagtaacataaaactgatgaccgtcatcatactgttgcagttagcacactttctcctgacataagtgcacagagcttcagtgtccaccaactgaccatgaaatagagtatgctgtaatcttaaggcataggttattagtgggaagagagtaataggttgctagtgtctgattatatggtagaaataatgcaaggaaaaaggtagccaccttctccattgaacagcagtacctgctgtttagcaaagactgatgagaagtagacttttttttttttggagatagagtctcactctgttgcccaggctggagtgtagtggtgtgttcttggctcactgcaccctccgcctcctgggctcaagcagtccttctgccttagcctcctaagtagctgagactacagacgtgcgccaccacacccagttcatttttgtatttttagtagagacagtgtttaccatgttggccaggcaggtctccaactcctgacctcaagtgatatgttcacctcagcctcccaaagtgctgggattacaggcatgaaccatggtgcccagcctcatttttgaaatggaatagagaacagttatatcacagttgagagtttaatcaaaatgaccggatcagcatattctttttttagatgagacagagtttcgcccttgtcacccaggctgtagtgcggtggcgcgatctcggctcactgcaacctccgcctcccgggttcaagcaattctcctgcctcagcctcccaagtagctgggattacaggcgtgtaccaccatacccagctaatttttgtatttttagtagagatggggtttcaccacgttggccacactggtctcaaactcctgacctcaggcgatccatctgcctcagcctgaaagtgctaggattacaggcgtgagccaccacacctggccagctcagcatattcttaagtaggattcacatttaattcttggtattataagttgcaaccatttgatttagaatgtatgcagctctcatgtttgtagtaataaagtttcatttttcctaagtaaaaaaaaaaaaaaaaaa

SEQ ID NO: 1398 - DNA, 4182 bp, Homo sapiens
agacgcagagtagattgtgattggctcgggctgcggaacctcggaaacccgaatgtgaggaccttaagggatccacagctgccgccccccgcagccatccagagcgcggtcacagtccgactggcggcacggaggcggcggcggcggcggcggcggcagcggcggcggcagcggcggcggcagctgtagctgcagcagcaggtaaagagagcgttttcccaaagaaaataacatagcacagaaggaaaaataaaaagaaattgctgcagattttactttatgtgagaaaatctacaatttcttcgagacactcatataaagatattggtgaatgaactttgctaagtatggattcaggcggtggaagtcttggattgcacacgccagactctagaatggcccataccatgattatgcaagattttgtggctggaatggctggtactgcacatatcgatggagaccatattgttgtttcagttcctgaagctgttttagtttctgatgttgtcacagatgatgggataactcttgatcatggccttgcagctgaagttgtccatggacctgatatcatcacagagactgatgtagtaacagaaggtgtgattgttcctgaagcggtacttgaagctgatgttgccattgaagaggatttagaggaagatgatggtgatcacatcttgacttctgaactaattacagaaaccgttagggtaccagagcaggttttcgtggctgaccttgttactggtcctaatggacacttagaacatgtggtccaagattgtgtttcaggagtcgactctcccacaatggtatcagaggaggttcttgtaactaattcagatacagaaactgtgattcaagcagctggaggtgttcctggttctacagttactataaaaaccgaagatgatgatgatgatgatgtcaagagcacttctgaagactacttaatgatatctttggatgatgttggagaaaaattagagcatatggggaatacaccattaaaaattggcagtgatggttcacaagaagatgctaaagaagatgggtttggttctgaagttataaaagtgtatatatttaaagcggaggctgaagatgatgttgaaataggtggaacagaaattgtcacagagagtgagtacaccagtggacattcagtagctggagtgcttgaccagagccgaatgcagcgggagaagatggtttacatggcagttaaagattcttctcaagaagaagatgatatcagagatgaaagaagagtttcccgaaggtatgaagattgtcaagcatcaggaaatactttggactcagcattagaaagcagaagtagtacagcagcacagtaccttcaaatttgtgacggcattaatacaaataaagtacttaaacaaaaagccaaaaagaggagaaggggagaaaccaggcagtggcaaacagctgttataataggtcctgatggacagcccctcacagtgtacccttgccatatttgcacaaaaaagtttaaatccaggggattcttaaaaagacacatgaagaatcatcctgatcatttaatgagaaaaaaatatcagtgtacagattgtgactttacaactaacaagaaagtgagtttccataaccacttagaaagccataagctcataaacaaagtcgacaaaacccatgaatttacagaatacacacgaagatacagagaggctagtccactgagttccaataaacttattttaagagacaaggagccgaagatgcacaagtgcaaatactgtgactatgaaactgcagaacaaggactgttaaacaggcatttgttggccgttcacagcaagaattttcctcatgtttgtgttgagtgtgggaagggttttcgacatccttctgaactcaagaaacatatgagaacccatactggtgagaagccatatcagtgtcagtattgtattttcaggtgtgcagatcaatcaaatctgaaaactcacattaagtctaaacatggtaacaatttgccatataaatgtgagcattgtccccaagcatttggtgatgagagggagcttcaacgccatctggatttgtttcaaggacataagacacaccagtgtcctcattgtgaccataagagcaccaattcaagtgaccttaagcggcacatcatatctgtccatactaaggattttcctcacaaatgtgaggtctgtgataaaggttttcatcgtccttctgagctcaaaaagcatagtgatatccataagggtaggaagattcatcagtgcaggcactgtgactttaaaacatccgatccatttattcttagtggccatatcctttcagttcatactaaagatcagccattgaaatgtaaaaggtgcaagagaggattcagacaacaaaatgagctaaaaaaacatatgaagacccatactggaaggaagatttaccaatgtgagtattgtgaatacagcactacagatgcatctggctttaaacgacatgtgatatcaatacatacaaaagactatccacacaggtgtgaattctgcaagaagggattccgaagaccatcagaaaaaaatcagcatattatgaggcaccacaaagaggctcttatgtaataagatcaatataaagaaagaagctatttaggagatatgatatgctacttgggagaaaactctcactaactgtctcaccgggtttcaaagcttgatactaaaccatgactttacattctttgtattaaagatcttaaaatatttgaattcacaggggatcccatagccctttgaaaattacttaaagaatttaagaagcactatagaatggttacagaaaaacttcttaagtatctgtgtaatagtattatatgcatacttaaactacagaggggaaaagcaaagacaaatactttatttggctgattatgttagatacaaatgtttctgagaagagaatacataattgagtttagtgatgctttgctatagcaagcaaacccacttttatgcaattttagaaatggggcagggaaacaaaatgtggtcattcatcagtcacttagtcattgagccttttatattgtacctggaaattaaattccagcaatgacaaaagttttgtgtattcattaaaagaaaactaactggaaaacaggttagattaattcagtactattaaaaaagaattcagagctgttaatattttatcacaggataggatacttaaaatatagcattctgtgctgagatctaaggtgaagtctataaagattaaagttcccttttttctgatgttcaagttgattgttgttcagtatggcatatatgacaaaagtatatttgagtcaaatgtggctttctaaaatggatgcaacattagcgttgcaaacaaaatcagcactatatttcttaatgatctaaagattaatttgagagaacacagttttcttaaatattataatgtctagagtttttttaggacagtcttagcaagtatgattgttctagtcttacttgctctaatgtttaaaggtgcaattttatgccattattgaaattgatttttaaaatctatataccatatgattaacatgcattttcaatatgaggcagtgtttatgcagtatttaacagagcaatctgctgccaatagagtttggaggtggatatttagtttacagtgtataaacttaaaatatgcatccctttaacaacgctttgtgttagcatgctgcaaatcaaaatggcacttaatattaaaagctggtttagggaaattttatgaaaatcctgttcataaatgtaatgcatatgatatgtacttttaagttttagttgcttcatgtttacattcagctgttcaacataattaaaatgtaattttacttcatgctatattgtggctttgtgtttcaaataatgttcacctttctgtttttgcaccagataagaatcagttccttgagaataaattttttatctttcttaacttcagaatattaaatttggaatatctactaaaattgtgtgttatgtggctgtaaatgatgtacacgctgtaaaataagatcgctactgttatgtgggattattatttctaaatgttactcattgaaatgagcatacaataaaaagcatttattgcacttaaaaaaaaaaaaaaaaa

SEQ ID NO: 1399 - DNA, 2265 bp, Homo sapiens
cggaagtttgcggggcggggcggacgcgggtggccaaggcccgtttccggcggcgtcgcgcgtttgcgagcctcgggtggtcctcagggagggtctctcggccagaacacgtggatgcccacccaccactgagcctcatggaggtggtaacatttggcgatgtggctgtgcacttctctcgggaggagtggcagtgtctggaccctggccagagggccctctacagggaagtgatgctggagaaccacagcagtgtggctggactagcaggattcctggttttcaagcctgagctgatctctcggctggagcagggagaagagccatgggtcctcgacctgcagggagcagaggggacagaggcaccaaggacctccaagacagattctacgattaggactgaaaatgagcaggcctgtgaggacatggacatcctaaaatcagaatcctatgggacagtggtcagaatctccccacaggactttcctcagaatcctggctttggagacgtttctgattctgaggtctggttagacagtcatctgggcagtcccgggctgaaagtgacaggctttaccttccaaaataactgtttgaatgaggagactgtggttcccaagaccttcaccaaggacgcaccccagggatgtaaggagctgggaagcagcggcctggattgtcagcctcttgaaagtcagggagagagtgcggaagggatgtcccagagatgcgaggagtgtggcaaaggcatcagagccacttcagatatcgctctgcattgggaaattaatacacagaaaattagcagatgtcaagaatgccaaaaaaagttatctgactgcttgcaggggaaacatacaaataactgccatggagagaagccgtacgaatgtgcagagtgtgggaaagtcttcaggctctgctcgcagcttaatcagcatcagagaatccacacgggagagaaaccctttaaatgcactgagtgtggaaaagccttccgcctgagctcaaaacttattcagcatcaaagaatccacactggggagaagccctacagatgtgaggaatgtggaaaagcttttggtcagagctcaagcctcatccaccatcagagaatccacacaggagagaggccctatggttgtcgtgagtgtgggaaagccttcagccagcagtcgcagctggttagacaccagagaactcacactggggagaggccctacccttgcaaggagtgtgggaaggccttcagccagagctccaccctagcccagcatcaaaggatgcatactggggagaaagctcaaattctaaaagcctcagacagtccaagccttgttgcacatcagagaattcacgctgtagagaaaccatttaagtgtgatgagtgtgggaaagcttttaggtggatctctcgcctgagtcagcatcagctgattcacactggagagaagccttataaatgcaacaagtgtacaaaagcctttggttgtagttcacggcttattcgccatcagagaactcacactggagaaaaaccatttaaatgtgatgagtgtggcaaaggctttgttcagggctcacaccttattcagcatcagcgaatccacactggagagaaaccctatgtgtgtaatgactgtggaaaagccttcagtcagagttccagccttatttaccatcagagaatccataaaggagagaagccctacgaatgcctccaatgcggaaaagccttcagtatgagcacacagcttacaatacatcaaagggttcacactggagagaggccctataaatgtaatgaatgtgggaaagccttcagtcaaaactcaacccttttccaacaccagataattcatgcaggggtgaagccctatgagtgcagtgagtgtggaaaagccttcagccggagctcatatcttattgaacaccagagaatacacactagggcccagtggttttacgaatatgggaatgccctggaagggtccacctttgtgagccgtaaaaaggttaatactataaagaaactgcatcagtgtgaagactgtgagaagatatttaggtggcgttcacacctaattatacaccagagaattcacaccggggagaagccttataaatgcaatgactgtggcaaagcttttaatcgtagctcaaggcttacccagcatcaaaaaattcacatgggatagaccacttacatataaatgtgtatatatgtgaataaacctatagccttaacttaaaaaaaaaaaaaaa

SEQ ID NO: 1400 - DNA, 3144 bp, Homo sapiens
gcggtcattgtcctggcagagcggcgagccggtgagtgtggctgcggggtcgcgcccaccctctacctgtgccgggggccggaacctggccccggggagggcgcggcctcggggagacggcgtgcaggcccagcactgttggtcaccgcaggcctgtcttcctattcaccgtgggcagcagagggatggctgctcagctgctgactgatgaggcactgactgggagactagacctgaaatgaaagagttggatccaaagaatgacatttcggaagacaagctctccgttgttggggaggccacggggggacccacgaggaatggtgccaggggtcctggctcagaaggagtgtgggaaccaggcagctggccagagaggccgcggggagatgcaggtgcagagtgggagccattgggaattccccaggggaacaaactcttagggggctcagtacccgcatgtcatgaactgaaggcatttgccaaccaaggctgtgtcctggtcccaccacggctggacgaccccacagaaaagggggcctgtccacccgtaaggcgtggcaagaacttctccagcacttcagacctcagtaagccccccatgccctgcgaggagaagaaaacctacgactgcagcgagtgtggcaaggcctttagccgaagctcgtccctgataaagcaccaaaggatccacacgggagaaaagccgtttgagtgtgacacctgtgggaagcacttcatcgagcgctcgtccctcaccatccaccagcgggtgcacacgggcgagaagccctatgcctgcggggactgcggcaaggccttcagccagcgcatgaacctcactgtgcaccagcgcacgcacacgggcgagaagccgtatgtgtgcgacgtgtgtggcaaggccttccggaagacttcctctctcacccagcacgagcggatccacacgggggagaagccctacgcgtgcggggactgcggcaaggccttcagccagaacatgcacctcatcgtgcaccagcgcacgcacaccggggagaagccgtacgtgtgccccgagtgcgggcgagccttcagccagaacatgcacctgaccgagcaccagcgcacgcacaccggggagaagccgtacgcctgcaaggagtgcggcaaggccttcaacaagagctcctcgctcaccctgcaccagaggaaccacaccggcgagaagccctacgtgtgcggcgagtgcggcaaggccttcagccagagctcctacctcatccagcaccagcgcttccacatcggcgtgaagccgttcgagtgcagcgagtgcggcaaggccttcagcaagaactcctcgctcacgcagcaccagcgcatccacaccggcgagaagccctacgagtgctacatctgcaagaagcacttcacggggcgctcgtccctcatcgtgcaccagatcgtgcacaccggggagaagccctacgtgtgcggcgagtgcggcaaggccttcagccagagcgcctacctcatcgagcaccagcggatccacaccggcgagaagccgtacaggtgcggccagtgcgggaagtccttcatcaagaactcctccctcactgtgcaccagcggatccacacgggcgagaagccctaccgatgcggcgagtgcgggaagaccttcagccgcaacacgaacctgacgcgccacctgcggattcacacctgagcgcctctgtgcagggctctcactggcggtgcccaggacggacgccagatggctgcgcgctttgtcagcagtgctgtgagaagttctcccctggggtggggactcggggtcaggggagctcaggaatgtggggttgtggaggggctggctgatcacacatgccccctccttactgagcctcagaaagcaagcccctcggtgtctgacgtatctggggacacttcaaggttcactgtagctgagccatggccgctggtaacagacatcagggttccagactagccctcttgagtaactgtcctagagctgggacaggtcacgcctgcctccacatctctgtttcttcagcgggaaagtggagctggtggaggggagggaggagacatctccctctttgtcagatacatcctggagtccagatgcagcttgtcaccatctgcattttctccgtgggttgggagcgtgagggccttcctatccctccacccaccgtttccctgcagtgcacgctggcagccaccaagctaggaagtggcaggagtttgccggttgtttgtgaggggaaaaatttttttttcagagttagcaaataacagtaactactgctttgaatgccaaagtttcttagagtggtctgttacgttttttaaaaataaaacttttaattaagggagactatgttattttaaacagtcttctgttttggccagttgtctggtcaaaatcggcttcagtgattgtgggaggggcaagaaggaaaagaaacagcagcaggtttgatattcagaaagaaatatgcatggattcaataagtatatacatctgagcacagattatttttatagtgatttttgcagctaaatgtgaaggcaactgtcttaagtcccttcctgctgctgtaacaaaagaccttagactgggtaatttataaacaatagaaatttgtcactcatggttctggatgctgggaagtccaagatcaaggctctggcagatttggtgtctgatggggtatgttcttcataggtagtgcttgtgtcttgatgtgtgtcttcacgtggttgtaaacggcagacttcctcaggccccttataagggtgctaatcccagtcacaagggccctgacctcatgacctcccaaaggtcctccctcttcatactgttacattggggatcaagtttccaatatgtgaatacagggaagcaccaacagaccatatcagtaacttcgagtgagtttcctaaggccgactgaagctctgtttacacataagagtgttccccaaagtgcactttctctggggccttttaggccatacttttaattttgttatttgatactactggttgctaatgttctggcatttccagttgttccacactccctgacactggtgtacacaaataaataatacagaaaaaaaaaaaaaaaaaaa

SEQ ID NO: 1401 - DNA, 981 bp, Homo sapiens
atgttctttatacataagaaggttcatataggacagacctttggtaaatataatgaatatgagaaagcctgtaataacttagctattattgtccaagggataactcaggtaagacagccaacttgctgtagaaagtctgacttcagtaaacatcagcaaacacacacaggagagaaaccccatgaatgtgttgaatgtgagaaaccctccattagcaaatcagacctcatgatacagcacaagatgcctactgaggaaaaaccttatgcctgtaactgctgtgaaaaattgttcagctataagtccagcctcactatccatcagagaattcacacaggggaaaagccctatggatgcaatgaatgtggaaaaaccgttcgctgtaagtcattcctcactttacatcagagaactcacactggggataagccctacaaatgtattgaatgtggaaaaaccttcactgtaaatcaacttctcactttacatcacagaactcactcaggggaaaagccctatcagtgtagtgaatgtggaaaaacctttagtcagaagtcatacctcacaatacatcatagaactcacacctggcaaaagccctatgcatgtgaccattgtgaaaaagcatttagccataagtcaaagcttactgtccatcagagaacacacacaggggaaaagccctatgaatataatgagtgtagaaaaccctttatcaataagtcaaacctcaggatacatcagagaactcacattagggaaaaaccctatgaatgcaatgaatgtgggaaaacgtttcaccaaaagtcgttcctcactgtccatcaaaggactcacaggcggaaaaaaccctacgaatgcaatgaactggggaaaacctttcactgtaagtcattcctcactgtccatcagaaaactcatactggggaaaaaccatatgcatgtaacaaatgtggaaaaacatatagccacaagtcataa

SEQ ID NO: 1402 - DNA, 3868 bp, Homo sapiens
ttttgtgggagtccggtctgtccacttgccggtccctcagaccgtcggcggtctctgtccgcttcgggacctgtccgctggtcgctccgcgtccgatggctcctggccgcggaaccttaggcctggccctggtctccgagcgcgggttcgccgggaggagcgtgtggcgggggtgtgccggggcgtgagtgcgccgagcatggggctgagcctggtgtggggagtgggtatctgcggagccggcctgaaccccacctcagccgggcgcggggagggggctccgtgcgtgtgatcgtgcagctgtgagcgcgtggccgccccgcggggctccgctgcaggcccctcagccccaggagcagtactcgctcttcagggcctgccctggatcctggaggctacacagctgcccactcctcctggggaggctgccgtggaggccatggagatccctgccccggagcccgagaagacagctctttcctctcaggatcctgctctttccctgaaagagaatctcgaggatatatcgggttggggtcttcccgaagccaggtccaaggaatcggtgagtttcaaggatgtggctgtggacttcacccaggaggagtggggtcaactagactcccctcagagggccttgtaccgggatgtgatgttggagaactaccagaaccttcttgccctaggacctccactgcacaagccagatgtgatctctcatctggaacgaggcgaggagccatggagcatgcagagggaagtccccagagggccctgtccagaatgggagctgaaggcggtgccctctcaacagcagggcatttgcaaagaagaaccggcccaggagcccatcatggagcggcccctcggcggggcgcaggcgtgggggcgccaggcaggtgctctgcagaggagtcaggctgcgccctgggcgcccgcacctgccatggtctgggacgtccctgtagaggaattccccctcaggtgtcccctcttcgcccagcaacgcgttcccgaggggggacccttgctggacacacgcaagaacgtccaggccactgagggcagaaccaaggcccccgcgagactgtgtgcaggggaaaacgcctccacgccaagtgagccagaaaagttcccccaggtgcgccggcagcgcggggcgggcgccggggagggcgagttcgtgtgcggcgagtgcgggaaggcgttccgccagagctcctccctcacgctgcaccggcgctggcacagccgggagaaggcttacaagtgcgatgaatgcggcaaggccttcacctggagcaccaaccttctggagcaccggcgcatccacaccggcgagaagcccttcttctgcggcgagtgcgggaaggccttcagctgccactcgtccctcaacgtgcaccagcgcatccacacgggcgagcggccctacaagtgcagcgcctgcgagaaggccttcagctgcagctcgctgctcagcatgcacctgcgggtgcacaccggcgagaagccctaccggtgcggcgagtgcggcaaggccttcaaccagcgtacacacctcacacgccaccaccgcatccacacgggcgagaagccctaccagtgcggctcctgcggcaaggccttcacctgccactcatccctcaccgtgcatgagaagatccacagcggggacaagccgttcaagtgcagcgactgcgagaaggccttcaacagccgctcgcgcctcaccctccaccagaggacgcacacgggcgagaagcccttcaagtgcgccgactgcgggaagggcttcagctgccacgcgtacctgctcgtgcaccggcgcatccacagcggcgagaagcccttcaagtgcaacgagtgcggcaaagccttcagctcccacgcctacctcatcgtgcaccggcgcatccacacaggcgagaagcccttcgactgcagccagtgttggaaggccttcagctgccactcgtccctcatcgtgcaccagcgcatccacaccggtgagaagccctacaagtgcagcgagtgcggcagagccttcagccagaaccactgtctcattaaacatcagaaaatccactccggggagaagtcgtttaagtgtgagaaatgtggggagatgttcaactggagctcgcacctcactgagcaccagaggctgcacagcgaggggaagcccttggccatccagttcaacaaacacctgctcagcacatactacgtgcctggcagcctgctgggtgcaggggatgctggactgagggacgtggatcccatcgacgcgctggatgtggcaaagctcttgtgcgtggttccccccagagctggcaggaatttctccctggggagcaaacctcgaaactaacatgatgtgctttggtgtcagtagctgctttctgagctactcaacaaggaaagcaccctggtcctccctggctcctagatccagaccaccttcctccaggtgtgggagccttgccttatcacccccatcaggtctgcatgccagggtgcctcctctagttaaagtcagtcacctccccagaagggccacactccaggaggagtgttgagagtcatttgaggtagtcttgccacctgttttccttgatgggcctggaagttgttgacaaggggaaagatctttcttgccaataaaaagaagggatatcgttgggtgccatggctcacacctgtaatcttaacactgtgggaggccaaggcaaggggatcacttgagcccaggagtctaggaccagcctggacaacatggtgagacctcgtctctacaaaaaatgcaaaaattagccagatgtggcggcatgtccctgtggtcccagctactcaggaggctgaggtgggaggatcatttgagcctaggaggtcaaggctgcagtgagccatgattcacagcactgcactgcagcctgggtgacaaagcaagaccctgtgtgaaattaaaaggaggtatatcaactgttgtatcctcggacgggctcctgacacggctttaatcaggagtttcctccataaactattattttcagaataataataaaacaagaattatgactagcatcactttccagtgaacattattatattgctagagaggagaataatcttgggtggtgggcatttggaaaaagtgaatttcctggacttaactcatgtaaatagctctactgcagagctgtgtgtttagtgacagtgcagtcaggggcattcccacagctgtcacagcacggcccagcatcattgtagccagatcctaacatgccaacatcacctcttgccatttagcccctagtgagaaattgggagctaccaggcaggtgcccagtgcattcagggaagatgggcacaacatcaggatgggtgtgtctggaagctcctcttcactgaccagggctgggcagggccaccctgggctggtgaggctgccctgcagggcttctcactatgtagcaccagtcaccagcccaggtcacagaagaagcccctcccagcacccactggagaggggaagctgaagcccagggagacgggctccatggtggtcccacatggagctgttttgcaaaccctggaaaaggcggctctccctgtcccaacactcttcagagacaggaagacagagttaatcttgaatgaatgttatttctacttagtcctaagcaagaataagctgccctcttggtgatcatactttatacggagtgctatcgtttatgaaatgctttcagtatgctttttaaattatgcaggcaaaataaccacacttcagaaaatgtggacttctgaaaaataaaatccccataattcttaataaaactgccttttgcactttgatacatta

SEQ ID NO: 1403 - DNA, 5583 bp, Homo sapiens
attggtctgtggacgccaaacttccgtgctaggactttctgcgtgtggaccgggggcctagtcctgcgtgggtccaacacagacaggagaaagctgcctgcttttgtgcctcccggaggtcctggtagaagcgaaacggggacaggagctgcagcgtcccaagcccagtgaggcgaagctactggagacagctctgccgggtccaaagttgggctcaccggctggaacttgaaaccggagcacgccggactcctgctgaagccatcatctctctctcctggccccgggcgccttggccggcgggcacaactggtttcggggccaaggtggtctggaagcctgactgtggcgtctggcctgggctcccgcgagcggaaaaggttcccctcctgtgagagggaaactatggaagttcctacgcccggagccagaactcctgctgctcccgcccgacccaaggtctagcttggcggcctcccacctgtgcttctgagggttctgcttccaagaggctgctggtgcccgggacaccagcagtttcgccatgggtgtttcgccatgggagtttcgccatgggtgactttggcctgagatgcgctccatggagcagattctggagttgctggtgttggaggagttcctgactatcctgtcccaggacatccacagcagggtgcagaagctgcaacgggcgagctgtgaagaagctgtaactcttttaaagtatatgtatgacttttaaaagagagagcttgtgaaactgagggaataggtgagtgagagagaggttttatctgccatcttcctcagggaggcccagcctcccctttattcatagagttctgggtctggtgggtccagaggactgagacatctcgctgtcttaattccccattcagattttcttgattgccctgagtagaccttacacgggccagtgattttttgttgttgttgttgttgttgtcttctctggaaccttcatcctccagatttccccccagtgcagtgaagagtgtgctattgcttttggtttccacggggaggcagtgtcgctgtcatagtgtccgctctggaggtagatcaaagggggctttcaactcctggctctgctccctactagctgtgcgactttgggcaagtgacttttgcttggctgggcttcactttctgcactggtcaaatgcagaaagggtaatagacccttctggggttgtttggaggattaaagggagagcagtatgtccgtaataatcgcactgctggcacacagctagtgcttgaaactgtgagctgctgttaggttaggggcagcagtctggtctcctctgcagagatgggtctcagttaattgtgaacttaaacagtttggcactgaggctttggggtcattgccccagggccacccaagtaagcttgtctaattgagaggaacaggagcagctggagaatgtgggggaggaaccgaagacctatgggggacatgtgtgtactgaaatgggctttctccccacaccctccacacaagcacatacacacattcactctgggtcatggcatcataaaaaccttgagtttaaaccatccctttctcttgttgggtccaaatggacagactctggttttctattgaagatttacacgcagattcctgtcataatttttcttttctatcgagccctgtcatgatgataagtgatagcaggttggttcctagatcatacaccatggacctagcacagaagtgttttcagaagagccttttccttacaaaacagcatgaaagtcattgagccaatggatactgagatttcaaactggagccaatggatacttagaggagccctgaagtgtagagtagttgctacttcttgttcactaggtctaattagcatgtcatcagtgtaacagactagtgtgttgtcttgtgaaagagaaaggtgataagatccctgtgaactaaactatgatgtagggcttgaaaattgatatacaatacgcctgaggtaggatggcgaaggtgtattcctggtcttaccagctgaaagtaaattgcttctggtggtctttactaacagttattgagaaaaaaagcattttcaaggtcaagaggtacatactaggttccaggggatatgttaatttgctcaagaaatgaaaccacatctggaacagcagctgcaattggagtcatcacctggcttagtttacaatgacccactaccatcttccaagatccatctgccttctgcataggccaaacaggtccacagaactcgaccctggaagagagagtcggggtcaggtcttcgggaggtggagggatcgaatgagggaactgatattccaagactccccacatcttggagcttcactcgccaggcatcccgcgctttcctgacgtcgcttcccctagtggtgcagcagcggagagctttgctacccagagcagcagggaggcgtggccacagaggcagaggcgtagtcgagccgaggaagaggaaagtggcctccggggaagccagagctgactgaagtgctcttgggaagaacaattcattgatttggtaccaacctgatgcaccctgatttgtcaaaggtggtaccaggtgggtgtcagtgtcacatacaagagtaaaactgttcctagagcaaatggcgatgagagagctgaacgcggattcatgctcaagcccccagatgggggctatgtgggagactagtgggtctgtgaaagagaactccagtcagagtaagaaatacagcacaaaaatagagaatcttggtcctgagagcgcttgcaggcacttctggagcttccgttatcatgaagcaaccggaccgcttgagactatcagccaacttcagaaattgtgccatcagtggctgaggccagagatccactcaaaagagcagatcttggaaatgctggtgttagagcagttcctgagcattctgcccaaggagacccagaactgggtgcagaagcatcatccacagaatgtcaaacaggctctggtcctggtggaattcttgcagagggagcctgatggaacaaagaatgaggtcacagcccatgagctgggaaaggaggcagtgctcttgggaggaacagcagtggccccaggcttcaagtggaagccagcagagccccaaccaatgggtgtgttccagaaagaatattggaatacataccgggtactacaagaacagctgggctggaacactcacaaagaaacccagcctgtatatgaaagagctgtgcatgatcaacagatgttagccctttctgagcagaaaagaatcaaacactggaagatggcatctaaactcatcctgcctgagtccctgagtttgttgacatttgaagatgtggctgtgtatttttctgaggaagagtggcaattattgaatcctcttgagaagactctctacaatgatgtaatgcaggatatctatgagactgtcatctctctagggttaaagctaaaaaatgacactggaaatgatcatcctatatctgtttctacatcagaaatacaaacatcaggatgcgaagtatcaaaaaagaccagaatgaaaattgcccagaaaacaatgggcagggaaaatcctggtgatacacacagtgtacagaaatggcatcgagcttttccaaggaagaaaagaaagaaacctgcaacttgtaaacaagagcttccaaaacttatggatcttcatgggaaaggccccacaggggagaaaccttttaagtgtcaggaatgtgggaaaagcttcagagttagctctgatcttattaaacaccacagaattcacactggagagaaaccctataaatgtcaacaatgtgacaggaggtttagatggagttcagatcttaataagcacttcatgacccatcaaggaataaaaccatatagatgctcatggtgtgggaaaagctttagtcataacacaaatctacacacacaccaaagaattcacacaggagagaagccctttaaatgtgatgaatgtggaaaaagattcattcagaactcccaccttattaaacaccagagaactcacacaggtgagcagccttatacgtgtagcttatgcaagagaaactttagtaggcgatcgagccttcttagacaccagaaactccacagaagaagggaagcatgtctagtgtctccaaactgaggaaagttaccatgtagagcttgactttagaagtggtgaaagaatacaaaattatgaggcacccaatgataggaatctgtgattaataaaacatttgggaagggtacatgttacacttcacaaaaaggaatctaagctgtctgttttattcagcattgcatcttctgtgcctagcacaagagttgatacataaggagtactttataaataaaaaaatgaaagtgtagtgatgagattcctttagctatctatctatatgtatatatctggttattcaaagcttccccacccccagtcatctaaatttttcaggtatcaagtgctcaacagacatatgatagtcaaggctcttagtctcattttttactctttgtcaagagaaatggaaaataagagtacttgggccctcttaagggagctcagagagaattactaaattagggacagtttcaatagttatcattctgtctacatgaacaatcaagaccaggactcagggaactttactctgtaacagaaagagaggattcagtgtttgccctgggagaattgtcccattcttgttgcttctctcctgagtacccactaccacaatgtcttctgtcaaggaattacaagtagcaagggaaggtctgaatgtaaggacaggcctagggaccttgcaagcacttgatatctctcctcttgctgactttgtcaacatagacatatagtgaaatgatgagggaggcagtcttggccctcatccaggtatctggtttttttttgtagaaagcacagataagtggtaaatggtctttttctgactttcattatgtggactggatggaggctttcaaactggtgccatactgctgcaggacctaaagggagccccatctttatggctgatcaactacaaccctatatgcctgaatactctgcaagaaggcctggagattttgcaaaactgatttattgagaatggcaaggagagccttgtgaacttttagctttggtgcacagctgataccaggagggaacatcctgaagtgtcagagaaaagtaaggcatatggctcacagtgatgatgccagtcagagccaggccagatggaaattgttttctgatgttactggttttcttttccctattagccaaagtgactatctcttaagagaagataatgtgacgtcaagggaagttggaaggcatggatttatatctatgtcagatcctggtttataatgttggccaaggcttatttatatatgtttatttagtattccataaaattgtacttcgtaatgaaaatgacacattttatcttaaatttagacaataaacaaaactttgttaccaaatcactcaaaaaaaaaaaaaaaaaaaaaaaaaaaaaaaaaaaaaaaaaaaaaa

SEQ ID NO: 1404 - DNA, 2141 bp, Homo sapiens
gcgccttagccagagggcgggcctgcgccaccctcggaaagcgtcacttccacttccggccggcgctctggctctgtacctggacagggctgcggtaggccagcggtgggctggcggttgcgctcctcagatcggcggcctttcgggcggtggcttgcgtttgagcctcagaaagcgaggagcggcctccacggaagccaagctggccgaggttgcagtccatgagctgggaaaggaggcagtgctcttgggagaaacagcagaggcctcaagtttcgggctgaagccaacagagtcccaaccagtgggcgtatcccaagatgaagaattttggaatacatacgagggtctgcaagaacagctcagcaggaatactcataaagagactgagcctgtgtatgagagggctgtgcctactcaacagattctagcttttcctgagcaaacaaacaccaaagactggacagtgacacctgagcacgtcttgcctgagtcccagagcttgttgacatttgaagaagtggccatgtatttttcccaggaagaatgggagttattggatcccactcagaaggccctctacaatgatgtaatgcaggaaaactatgagactgtcatctctctagcattgtttgtgctccccaaacctaaagtgatctcctgtctagagcaaggggaagagccatgggttcaagtatccccggagtttaaggatagtgccggaaaatctcctacagggttaaagctcaaaaacgacactgaaaatcatcagcctgtgtctctttctgacttagaaatacaagcatcagcaggcgtcatatcaaaaaaggccaaagtaaaagttccccagaaaacagcaggcaaagaaaatcattttgatatgcacagagtgggaaaatggcaccaagattttccagtgaagaaaagaaagaaactttcaacctggaaacaagagctgctcaaacttatggatcgtcacaagaaagattgtgcaagagagaagccttttaaatgtcaggaatgtgggaaaaccttcagagttagctctgaccttattaagcaccaaagaattcacactgaagagaaaccctataaatgtcaacagtgtgataagaggtttagatggagttcagatcttaataagcacttaacaacacaccaaggaataaaaccatataaatgttcatggtgtgggaaaagcttcagtcaaaatacaaatttacatacacaccaaagaactcatacaggagaaaagcccttcacatgtcatgaatgtggaaaaaaattcagtcagaactcccaccttattaaacaccggagaacccacacaggtgagcagccatatacttgtagcatatgcaggagaaacttcagcaggcggtcaagccttcttagacaccagaaactccacctgtgaagagaagcttgtccagtgtcctcattctgaagacattcaccaaatggagcttggcactaaaatttatgtaaaagaaaaatcacaaaccttgaaaaattttacatcagaaaatgggataaacatacatttcacagaaaataatcaagacttgctctgcagccactcagtagtcttctgtggtcacagaagtaaacattgttggctttgtattgatctctccagtcatttttgaacacatccaatagaaacattggcagcatggtcttccaaaacaaaaagcagtaacatgcatgtttaattgcataccattctcttcacagtagcaggcttaccaatttccatagtctcatgaggccgaaatgaattacaatgtaaagtgttccaggaaccaaattggattttctttcttttgtcattggacacggtttgcaaagttggacatcacttgagttccttcttaaacttttcggcaacttctcttggatcctgttatcacagttttttactgtgatgaaatcttgttaaccaccactagggaatctccagatgaactattaatgcactgtcttatgcctctcattggtgatgtttggaaaatagaagacatctctaatggaatcatgggggaaacgggttggaatttgtagccatggaatatatattagatgtaaagaattttctgcaataaaagaaactagacttgttaaaaaaaaaaaaaaaaaaa

SEQ ID NO: 1405 - DNA, 2671 bp, Homo sapiens
ctgcgcgcgggcgggcgggctatggcgcaggcgggttgtggggccggcgctggtggcggggcccggtgcatggcggtctgtcggcggagtcgccctcgggggctgtcagatttgtgacccagaaggaaatctctgacctcagctgtggctcttggtgctggccagaagccaacttcatgtctgagtgcacgagcagcagtttgccatggagagcttggggctgcacacggtgacccttagtgatgggacaacagcctacgtccagcaagctgtcaaaggagagaagcttcttgaagggcaggtgatccagctcgaggatgggaccaccgcatacattcaccaggtgacggtacagaaagaagctctctcctttgaggatggtcagcctgtgcagctggaagatggcagcatggcttacatacaccgcacacccagagaaggctatgaccccagcaccctggaagccgtccaactggaagatggctccactgcctacattcaccaccctgtggctgtgccatcggagagcaccatcctggccgtacagacagaggtgggcttggaggacctggcagcagaggatgatgagggcttcagtgcagacgcagtggtggccctggagcagtatgccagcaaggttcttcatgacagccagattccccgtaatggaaaagggcagcaagttggagacagagcattccgctgtggctacaagggctgtgggcgtctctacaccaccgctcatcacttaaaggtgcatgaacgagctcatacaggtgaccgtccatacagatgtgacttccccagctgtggaaaggcctttgccacaggctatggactgaagagccacgttcgtacccacactggtgagaaaccatacaagtgcccagaggagctgtgcagcaaggccttcaagacctcaggagacctgcagaagcatgtccgtacccacactggtgaacgcccgttccagtgcccttttgagggctgtggccgctccttcaccacatctaacatccgcaaggtacatgtgcgcacccacacaggcgagaggccctacacctgcccggagccccactgtggccgcggcttcaccagcgccaccaactataagaatcacgtgcgcatccacacaggggagaagccatacgtttgcacggtgccaggctgcgggaaacgcttcaccgagtactcgagcttgtataagcaccacgtggtgcacacacactgcaagccctacacctgcagcacctgcggcaagacctaccggcagacctccaccttggccatgcacaagcgcagtgcccatggcgagctggaggccacggaggagagtgagcaggccctctatgagcagcagcaacttgaggccgcctctgcagccgaggagagtccgccacccaaacgaccccggatagcttacctttcggaggtgaaggaagagagagatgacatcccagcccaggtggcgatggtgactgaagaagatggggccccccaggtggctctgatcactcaggatggtgcccagcaggtcagcctgtccccggaagacctgcaggccctggggagtgccatcagtatggtcacccagcacggcagcaccaccctcaccatccccagtcctgatgccgacctggccacatctggcacacatacagtcaccatggtcagcgccgatggcacccagacgcagcccgtcacaatcattacctctggggctgtggtggctgaggactcaagtgtagcatctcttcgtcatcaacaggtggcactgttggccacagccaacggaacgcacattgcagtgcagctggaggaacagcagaccttagaggaggccatcaatgtggccactgcggccatgcagcaaggggctgtgaccctggagacaacagtgtcggagagtggctgctgagtccaagagggctgggtcccacaccatgctggaggaagtgccatctgcatggccactcttgcccccaagggcccaggctgtggctgacacatagaaggtggccacataggtctctggggtgagaagacagcaagaaaactgcctaactgaagggaatgggggccctgctcaagaagggggccaggcagctggaatcaggggagtgcatcatcctcgggagctgacaacagccaggctacaccagggcacccgcctctcaaaatcagctgggcgcccactctcctcctaaagaacacccttctggccctcagtctgttccccttctcaggtagagattggggctgctatggggactggccctgtagggttgagccacagacagctcttcagcccagtagcagtggagcaggccctgtcctgccctcccagcaataaccacctccctggaggccagctgagatgcctggctacttggcaccagggacttcctgacaccacagtcaattaattcctcaggggcctgtggctggagaaaaggtgcccagcccccaccactcctcagctgccccccaacctctctatggcagagaggcagggagtggccctgtacatagactgctggggattgggtttgatttgttttgtttttttaaattccattttgataatttttttcctgctctgggtggtggtggcacatggatgaatgagtatttaataaaagttccaaatttcaaaaaaaaaaaaaaaaaa

SEQ ID NO: 1406 - DNA, 2057 bp, Homo sapiens
aagccgagttcccctctgccttgcgcgcttccccgcctaccccgagcggctcaggtgtcctgtcgtgctcacctgcgccggtcgctggaccgcggggcgctaaccctggagagcccaggagcgggcgggacatggactgcgtgatctttgaggaagtggctgtgaacttcaccccagaagagtgggcattgctggatcatgctcagaggagcctctacagagatgtgatgctggagacctgcaggaaccttgcctccttggattgttacatttatgttagaaccagtggatcaagttctcagagggacgtttttgggaatggaatatccaatgatgaagaaattgtaaagttcacaggaagtgattcctggtctatttttggagaaaattggagatttgataacactggagatcagcaccaaatcccacagaggcatctgagaagtcagctggggagactctgtgaaagtaatgaaggtcatcaatgcggagagaccttgagccagactgcgaaccttcttgtgcacaagagttaccctaccgaagctaaaccctctgagtgcactaagtgtggcaaagccttcgagaatcggcagagatctcacactggacagagaccgtgtaaggaatgtgggcaagcctgcagctgcctctcctgccaaagccctcctatgaaaacgcagactgtagagaaaccctgtaattgccaggactcaaggacagcatctgtgacatacgtgaaaagtctcagcagtaaaaagtcttatgaatgtcagaaatgtggaaaagctttcatttgtccctcatctttcaggggacatgtgaatagtcatcatgggcagaaaacccatgcatgtaaagtatgtgggaagacctttatgtattactcctaccttacacggcacgtaagaactcacacaggagagaaaccctatgagtgtaaggagtgtgggaaagccttcagctgtccctcgtactttcgagaacatgtcagaacacacactggagagaaaccgtatgaatgtaagcattgtggaaaatcattcagctgttactcctcctttagagatcacgtgaggacgcacactggagagaaaccctgtcagtgtaaacattgcggaaaagcgttcacttgttactcgtctcttcgagaacatgggagaacgcacagtggagagaaaccctatgaatgtaaggaatgcggcaaagccttcaggtacccctcctctctgcgagcacacatgagaatgcacaccggagagaagccctatgtgtgcaagcagtgtgggaaggccttcggatgtcccacttactttagaagacatgtgaaaacacacagcggggtgaagccctatcaatgtaaagagtgtgggaaagcctacagtttttcctcctcccttcgaatccacgtgaggacgcatactggagagaagccctttgagtgtaagcattgtgggaaagccttcagctgtcactcctcccttcgagagcatgtgcgaacccacagcggagagaaaccgtacgaatgtaatcaatgtgggaaagccttcagccacgctcagtactttcaaaagcatgtgagatcacacagtggggtcaaaccctacgaatgtactgaatgtgggaaagcctacagttgttcctcgtcccttcgtgtgcacgtgagaacgcacactggagagagaccgtatgaatgcaagcagtgtgggaaaaccttcaggtatctcgcatcgcttcaagcacatgtgagaacacatgctggagcgtgaatctacgaatacagtggacctgggagagtgttcaaccgtaaaaccttgttgtaaatgtgagaaacgttatttatgtagagcatgtaggaaaacctggtatagcacttattttgtacctaaaaattcagagtaggagagaaatctcttaattatgattaatatggtattgcctttacatgcctcagccttaatagtgattccttttgtattaatttctagtgtatgtttgtgatataaacatttaataaatatcctgttttgtacgctttcaaaaaaaaaaaaaaaaaa

SEQ ID NO: 1407 - DNA, 2099 bp, Homo sapiens
gtggcgccaatcaggcgcgtccctctggcgctggagccaggacctggcgttgggcggtacttggacagcggttcttgagctctcgcggttgccggtagattgttgccagttgccagttgccagtcgtttttcggaaagctggcagcggctttttcaccgggttctgcttgaggccgagccaaagagtggctgtgactcgggagacggagtggaacacccggctgggcaggcccggacagctcccgcgacccagcaccgcaggatcagaccgtgcctctgcggggagaggctggagaggaagagtccggcctgggagccgtcagagcagccctgcagaacggggtgggggctgctgtagatagacccttacgcccagagaactgctgggaggctgtggcgcgaggcgggactcaaatgctggaggaaggagtactgccttccccaggccctgcccttccccaagaggaaaacacaggagaggaaggaatggctgctggtctcctcacagctgggccccggggatccacattcttcagcagtgtgacggtagcttttgcacaggaaaggtggaggtgcctcgtgtctactccacgggacaggttcaaggaggggataccaggaaagtccaggagccttgtcctactaggacttccagtttcccagcctggcatgaactcccagttggaacaaagggaaggcgcatggatgctggagggcgaagacctgcgaagtccctctccaggctggaagattatatctggatcaccaccagagcaagccctttctgaagcttcattccaagacccatgtgtagagatgccccctggggattcagaccacgggaccagtgaccttgagaagagcttcaatctgagaccagtcctctctccgcaacagagagtgcccgtggaagcgagacctcgcaaatgtgagacacacaccgagagcttcaagaactcggaaatcctgaaacctcacagagcaaaaccatatgcatgtaatgaatgtggcaaagccttcagttactgttcttccctttctcagcatcagaagagccacactggagagaagccctatgagtgcagtgaatgtgggaaggccttcagccagagctcatctctcattcagcaccagaggattcacactggagagaagccttacaagtgcagtgaatgtggaagagccttcagccagaacgccaacctcaccaaacaccagcgaacccacaccggagagaagccctacagatgcagcgagtgtgagaaagccttcagtgactgctcagctcttgttcagcatcagagaattcataccggagagaagccctacgaatgcagcgactgtgggaaggccttccgtcacagtgcaaacctcacgaaccatcagaggactcacaccggggagaagccctacaagtgcagcgagtgtgggaaggccttcagttactgcgcagcgttcattcagcaccagaggattcacaccggggagaagccctacagatgtgccgcgtgtgggaaggccttcagccagagtgcaaacctcacaaaccatcagaggactcacactggggagaaaccctacaagtgcagcgagtgtgggaaggccttcagccagagtaccaatctcataatccaccaaaagacccacaccggggagaagccatataaatgtaatgaatgtgggaaattcttcagtgagagctcagccctcattcggcatcatataatccacaccggagaaaaaccttatgagtgtaatgagtgtggtaaagcgtttaaccagagctcatcccttagtcagcatcagagaatccacacaggcgtgaaaccctacgaatgcagcgagtgtgggaaggccttccggtgcagctctgccttcgttagacatcagagactccacgccggagagtaactaggaacatggtagaagtggagagagtcccggacatgccgactcaggacaggtgggtgaggatctgagaaatgctaaaggcttgaaagcatctgaagacatctaacttagagtctgcagcccagagccacatgcaaaacaccttcaataaacagccactatttcacatgctgtaaaaaaaaaaaaaa

SEQ ID NO: 1408 - DNA, 1944 bp, Homo sapiens
gactttacccaggaggaatgggggcagctggaccctacccagaggatcctctaccgtgacgtgatgctggagacctttggctacctgctctccataggtcctgagcttccgaagcctgaagtcatctcccagctggagcaagggaccgagctatgggtggctgagagaggaaccacccagggctgccatccagcctgggagcctcgatctgaaagccaagcatcacgcaaggaagagggcctgcctgaagaggagccatcccatgtcacgggaagggaaggattcccgacagatgctccttatcccaccacgttagggaaagacagggagtgtcagagccagagtctggcactcaaggagcagaataacttgaagcagttggaatttggcctcaaggaagcaccagttcaagatcaagcctacaaaactctcagactcagggaaaactgcgtcctgagttcaagcccaaatccattcccagagatctctagaggggagtatttgtatacttacgactcacagattacagactcagaacataactccagcttagtcagtcagcagacaggctccccaggaaaacagcccggtgaaaacagtgactgtcacagagattccagtcaggccattccaattacggaactcacaaaaagccaggtgcaggacaaaccctacaaatgtactgactgtgggaagtcgtttaaccataacgcacacctcaccgtgcacaagaggattcatacgggagaaagaccttatatgtgcaaggagtgtgggaaagccttcagccagaactcctccctcgtccagcatgagcgcatccacactggagacaagccctacaagtgtgccgaatgtgggaagtctttctgccatagtacacaccttaccgtccatcggaggattcacactggggagaagccctatgagtgtcaggactgtgggagggccttcaaccagaactcctccctggggcggcacaagaggacacacactggggagaagccatacacctgcagtgtgtgtgggaaatccttctctcggaccacttgccttttcctgcacctgagaactcacaccgaggagaggccctacgagtgtaaccactgcgggaagggcttcaggcacagctcatccctggcccagcaccagcggaagcacgcgggggagaagccctttgagtgccgccagaggctgatctttgagcagacgccagctctcacaaagcatgaatggacagaagccctgggctgtgacccacctttgagtcaagatgagaggactcaccgaagcgacagacccttcaaatgtaatcagtgtgggaagtgtttcattcagagctctcacctcatccggcaccagataactcacaccagagaggagcagccccatgggcgaagccggcggcgtgaacaatcctcgagcaggaactcacacctggttcagcatcaacacccgaactccagaaagagctctgcaggcggacgaaaggcagggcagccggaaagcagagccctggctttgtttgacatccaaaaaatcatgcaagagaaaaaccctgtgcacgttattggggtggaagagccttctgtgggtgcttccatgttatttgacatcagagaatccacataggagagaaactttgctgatgacttttaaccacaagtaaaaaatgtggtaagtccacatagtgtactcatggaaggaggggctgggggtagaaatgtcatgggtgacttctgactttctaaggaaatgatgcttcccaagcacccgaggttggttggtcccaaatctatcaaactcagtgccctctttagcgacatattttgtgacattccttccattacaccacagtgagttcacaggtaatataacctacccacctgtgtaatgtcgaaaaaaatcaatatgcggcccctatttgtaaaggatcattaaaat

SEQ ID NO: 1409 - DNA, 2957 bp, Homo sapiens
gccggagccagcagtggcaacccgctggggtccctttccacactgtggaagctttgttctttcgctctttgcaataaatcttgctacttctcactctttgggtccacactgcttttaccagctgtaacactcaccgcaaacgtctgcagcttcactcctgaagccagcgagaccacgagcccaccgggaggaacgaacaactccagacgcgccgccttaagccttaagagctgtaacactcaccacgaaggtctgcagcttcactcctgagccagcgagaccacgaacccgccagaaggaagaaactccgaacacatccgaacatcagaaggaacaaactctagacgcgccaccttaagagctgtaacactcaccacaagggtccgcggcttcattcttgaagtcagtgagaccaagaacccaccaattccggacacagttggaaatgcagaagggcacttgagtttggctgcagtctcccacacggagaccttctggaggaagatgagccctaaacgcgatgggttggggacaggtgatggtctgcactcacaggttttacaggagcaggtctccacaggagacaatctccatgaatgtgactcccagggaccaagtaaagacactttggttcgtgaggggaagacctacaaatgcaaggaatgtgggagcgtgtttaacaaaaacagcctccttgttcgacatcagcagattcacactggggtgaagccttatgaatgccaggagtgtggaaaagcctttcctgaaaaggtcgacttcgttcgacccatgaggattcacacaggggagaagccctgtaagtgcgtggagtgcgggaaggtcttcaaccgcaggtcgcacctcctgtgctaccgccagattcacactggagagaagccctatgagtgcagcgagtgtggaaagaccttcagctatcactctgtcttcatccagcatcgtgtgacccacactggagaaaaactctttgggtgcaaagaatgtggaaaaaccttttactacaactcttccttaacccggcacatgaagattcacactggagagaagccctgcaagtgcagtgagtgcgggaagaccttcacctaccgctctgttttcttccgacatagtatgacccacactgcaggaaagccctacgagtgcaaagaatgtgggaaaggtttttactacagctattccctcactcgacatacaaggagtcacactggagagaaaccttatgagtgccttgaacatagaaaggactttggctaccactctgcttttgcccaacagagtaagatccactctggaggaaaaaacctttgagtgcaaatgatgtgggaatttgtgggttttctttttttttttttctttgatacatagagagccacactgaggagaagcactctgaattcagtggcagtaggaaagctgtgacctgcagctcatcctcacttggcattgaagaattccttccagagataaactctatgagatatgtgggaaggccttttgcaagtgggcccacatcagtcaacgtcagagaacttaaactgcgaaaagacattttgacaaaaactagtgaagaaaatcttttggccacaggaaatatcttcctcagcatctgagaatttttccaggagggagacctgttggttattgtgcacttaaaagaaccacccacacctctctccatagtttatatcactaagccacttcaggattttttttttttaagtaagaagggaactgtaaaagagaaaaaaagaaattcatgcatagcttctgtcagacttctctgaaagccatgcctatcaaaatttgaattcagttcttcattttgcagatggctgaaaggtacaaaggccttgcctcgttatttgtcctttatatgtattcactcctgtctacaggagaattgtcctctgtaaagattaactctgtaaagatttattgaatgcattctttgttctaaaacattgtactcctgaggaatgtaagtctttgtgagaaatatgaacgcttaagtaatggaatatgtgaaacttgtaagaacgtagaatataaaaatactgccatataaaatcctttcatatctgaggaggtaagtaaccacattgaatgggcatattttgctacatcatttaagactacttaaggctttaatttaacaaaaaacaattcttcatgtggttttgaacacccagtgctcaatatacttgtttgttttgatttattttctcagggacgagagaatgatggtgaagctgtgttgctttcccaggtgagccttgattatttcctctgtgctttctcagcttctttggccttctgtaagaggggcttctccaagagcatgtcactagttttctagaagttaaacaagagctaagacaaacaaaacaaaacacagcttatctaatctaatgagaaactcagaaaaaaatgttttgatgaatacaatgtattaaaatataaaacatgtagatcctttgacatgttaattcaattctagaaatcctcagaaatgtttttatattatgcagagatgtgcgtgcaaagaataatcgctgcagttttgtttttatgtgtgaaacgttgagaacaatctaaatgtttatcagttggaagtaagttatggtacatctgttctatgaaatactgtgaaacaataaggtatctctgtatgtactgatatcaaaacatctctaagatacagtatttagtaaaagagaaagtttcaggaaataaaactacatctagaagtataagcataaaactgttaatagtggttttctgcaggaaatgggatggaccagggttatatgcaatgttcagtttttacttttatacttaagtattgtttatgtttgaaaaataaaaagcatttattgtttttgcaataaatgtttaaaatatttcaataaagatagcatgttagaataaaaaaaaaaaaa

SEQ ID NO: 1410 - DNA, 1092 bp, Homo sapiens
agagatgaaaaactctacatatgtactaaatgtgggaaggccttcatccagaattcagaattaattatgcatgagaaaactcatactagagagaaaccctataaatgcaatgaatgtgggaaatcatttttccaggtgtcatctctactcaggcatcagacaactcatactggagaaaaactctttgaatgcagtgaatgtggtaaaggcttctccctgaactcagccctcaatatacatcagaaaattcacactggagagagacatcacaaatgcagtgagtgtgggaaagcctttacccaaaaatcaacactcaggatgcatcagagaattcatacaggagagaggtcctatatctgtactcaatgtgggcaggccttcatccagaaggcacacttgattgcacatcaaagaattcatactggagagaagccttatgaatgcagtgactgtgggaaatctttcccttctaagtcacaactccagatgcataagagaattcatacaggagagaaaccctatatatgcactgaatgtgggaaggctttcaccaacaggtcaaatctcaatactcaccagaagtctcatactggagaaaagtcttatatatgtgctgaatgtgggaaggccttcaccgacaggtcaaatttcaataaacaccagaccattcacactggagagaaaccctatgtttgtgctgattgtgggagggccttcatccagaagtcagagttgattacacatcagagaattcatactacagagaagccttataaatgtcctgactgtgagaaatccttctccaagaaaccacatctcaaagtacatcaacgaattcacacaggggagaaaccatatatatgtgcagaatgtgggaaagccttcactgataggtcaaatttcaataaacatcagacaattcatactggagataaaccgtataaatgcagcgactgtggaaaggggttcacccagaaatcagttctcagtatgcatcgcaatattcatacatgaaagtaatcctgtttcttgaaaatgagagccttataagctgacaaaagtcaggtctaactatatattataaaatcatcc

SEQ ID NO: 1411 - DNA, 2622 bp, Homo sapiens
agacctggcttctgtactgcgcgcgcacatgcgcgcaaacccggaagcggattatgtggagtgaaagttacaccgtggcggattgacttctaaggactcttggtacatgaggaagaaacccggaaggggaagaggaaagcaaaggcgtcaggaatggttcttcctcaggtattttttctaaatgtgagatcaaggaattaccaccaaaaaaggagagtaatacaggagaaatattccagacagtaatgttggaaagacatgaaagccacgacatacaagatttttgcttcagagaaacccagaaaaatgtacatgactctcagtgtctgtggaaacatgattgaagacattataagcgagtgcgtgtgacctataaggaaagtctcattggtagaagagacatgcatgggagaaaggatgatgcacaaaagcagcctgttaaaaatcagcttggattaaacccgcagtcacatctaccagaactgcagctatttcaagctgaagggaaaatatataaatatgatcacatggaaaaatctgtcaacagtagttccttagtttccccaccccaacgtatttcttctactgtcaaaacccacatttctcatacatatgaatgtaattttgtggattcattattcacacaaaaagagaaagcaaatattgggacagaacactacaaatgtagtgagcgtggcaaggcctttcatcaaggcttacattttactatacatcaaataatccatactaaagagacgcaatttaaatgtgatatatgtggcaagatcttcaataaaaaatcaaaccttgcaagtcatcaaagaattcatactggagagaagccatataaatgtaatgaatgtggcaaggtcttccataatatgtcacaccttgcacagcatcgcaggattcatactggagagaaaccatataaatgtaatgaatgtggcaaggtctttaatcaaatttcacaccttgcacaacatcaaagaattcataccggagagaaaccttataaatgtaatgaatgtggaaaggtcttccatcaaatttcacaccttgcacaacatcggacaattcatactggagaaaaaccttacgaatgtaacaaatgtggcaaggtgttcagtcgcaattcctaccttgtacaacatctgatcattcatactggagagaaaccttacagatgtaatgtatgtggaaaggtcttccatcatatttcacaccttgcacaacatcagagaatccacactggagagaaaccttacaaatgtaatgagtgtggcaaggtcttcagtcacaagtcatccctagtaaatcactggagaattcatactggagagaaaccttacaaatgtaatgagtgtggcaaggtcttcagtcacaagtcatccctagtaaatcactggagaatccacactggagagaaaccttacaaatgtaatgaatgtggcaaggtcttcagtcgcaattcataccttgcccaacatctgataattcatgccggtgagaaaccttataagtgtgatgaatgtgacaaagcattcagtcaaaattcacatcttgtacaacatcacagaatccatactggagagaaaccttacaaatgtgatgaatgtggcaaagtcttcagtcaaaattcataccttgcatatcattggagaattcatactggagaaaaagcttataaatgtaatgaatgtgggaaggtcttcggtctaaactcatccctagcacatcatcggaaaattcacactggagagaaacctttcaaatgtaatgaatgtggcaaagcttttagtatgcgttcaagcctcactaatcatcatgcgatccacactggagagaaacatttcaaatgtaatgaatgtggcaaactcttccgcgacaattcatatcttgtacgtcatcagagatttcatgccggaaagaaatctaacacatgtaattaatgtggcagagtgttcagttagcattaaagccttgtaagacatacaataatttatactggagaaaaactttgcaagtataatgaatgtagcagagcctttagtttttgttcaaggcttaataaccgttagctagaccatagaggacagaaactttactaatgtactgaatgtggcaaggtcttaaggtaaaatctgagaccaggattcttcaaagaattcttgctggtgagaaacctaacaaatgtaatgaatgtggcaaggtcttctggcacaattctcacattgtacaatattgcaaaaattcatgcttgagagaaacaaaaacactgagagtgggaaaccattatgacttcaaacattcatcaacatcagagaatccatactaaagagcatttataataattatatgtgatagagattttccgcaggccaaagtctcactaggcatcaaaaacttttttgatgaaaccatacaaatgtaacgtgcatgcttaagcttttacccaggcatcaaaaccggaacatcacagggtttatactggagagtaactacacaaagataatgtaataagcctttcagtgtaatattcatgattttgtcgtgagagatccactcaataaaaaccaggcaaatgtagtgaatctggaaaaaaaaaaaaaaaaaaaaaaa

SEQ ID NO: 1412 - DNA, 7025 bp, Homo sapiens
actcttggtaatgcttgcaggtggcccgttcttcctctttgtccttcgctgccacgtgagaggggagtgtacgcgtgtgcgcgcgtgcgagtgtgcgcgtgtgcagtccccgactcgtcccggcccgttcggagccgcccgggagcgcacaaaggccgacggtttgggcgcgtgcgcgggacacgggggacgggcggtgtcacgtgatcgcgaggccgcgggcgcgcgggcgcgactcggcggcggcgtcttttatcctggtccctacaaataagcctgctcatgtgagataagaaaggagttcctggaaccaggaattcattctcagtgtagaagacctagctgagacctcactccacagttttggggcagaagcagaagagacgcacagtagaaccgatctcagccttgctgatcatctcgtacagcagcagaaaatgaccatgttacaggagtcattctcatttgacgatttatctgtggacttcacccaaaaggagtggcagctactggatccctctcagaagaatttatacaaggatgtgatgttggagaactatagcagcctagtgtcactggggtatgaagttatgaaaccagatgtcatcttcaaattggagcaaggagaagagccgtgggtaggagatggagaaattccaagttcagattctccagaagtctggaaagtagatggtaacatgatgtggcaccaggataaccaagacaagcttaaaattataaaaagaggtcatgaatgtgatgcatttggaaaaaatttcaatctgaacatgaactttgttcctttaaggaaatcaaacagtgaaggtgacttagatggattgattttaaaacatcatttagatttgcttattccaaaaggagattatggaaaagcagaatcagatgactttaatgtgtttgataatttttttctccattccaagcctgaggatactgatacctggttaaaatactatgactgtgataaatataaagagagctataaaaagtcacagattatcatatatcatagaaatcgtttaggggagaaactctatgaatgcagtgaatgtaggaagcgcttcagtaagaaaccaagtctcattaaacatcagagcagacatataagagacatagcctttggctgtggtaattgtggcaaaacctttccccagaagtctcagtttattacacatcacagaactcatacaggagaaaaaccttataattgtagccagtgtgggaaagccttctcccaaaagtcacagctcacatcccatcagcggacacatacaggagagaaaccttatgagtgtggtgaatgtgggaaagccttctcccggaagtcacatctcatatcgcattggagaacacacacaggagagaaaccctatggatgcaatgaatgtgggagggcctttagtgaaaagtccaatctcattaaccatcagagaattcataccggtgagaagccttttgaatgcagggaatgtgggaaagccttcagcaggaagtcacaactcgttacacatcacagaactcacacaggaacaaaaccctttggatgtagtgattgtagaaaagcattctttgagaagtcagagcttattagacatcagacaattcatactggagagaaaccctatgaatgcagcgagtgtaggaaagcatttagagagaggtcgagtctcattaatcatcagagaacacatacaggagagaaacctcatggatgcattcagtgtgggaaggccttctcccagaagtcacatctcatatcacatcagatgacacacacaggagaaaaaccctttatatgcagtaaatgtgggaaagccttcagcaggaaatcacagctcgttagacatcagagaactcatacgggagaaaaaccgtatgaatgcagtgagtgtgggaaagctttcagtgaaaaattaagtctcactaatcatcaaagaattcatacaggagaaaaaccatatgtatgcagtgaatgtgggaaagccttttgtcagaagtcacatctcatatcacatcagaggacacatacaggggagaaaccctatgaatgcagtgaatgtgggaaggcctttggtgagaagtcaagtcttgcaactcatcagagaactcatactggagaaaaaccgtatgaatgcagggactgtgaaaaagctttctcccagaaatcacagctaaatacccatcagagaattcacactggagagaaaccctatgaatgcagtctttgtaggaaagctttttttgagaagtcggagctaattagacatctgagaactcatacaggagaaaaaccttatgaatgcaatgaatgtagaaaagccttcagggagaagtcaagtctcatcaatcatcagagaatacatacaggagagaagccttttgaatgcagtgagtgtggcaaagctttctctcggaagtcacaccttataccacatcaaaggacacatacgggtgagaaaccctatggatgcagtgaatgtaggaaggccttctctcagaagtcacagctggttaatcatcagagaattcatacaggagagaagccttatcgatgcattgaatgtgggaaagctttctcacagaagtcacagctcatcaatcatcagagaactcatacagtaaaaaaatcctaggaatacagttaatagtagtctttgacagatcatcttggacttcaggaaatgcaattatgataacgtttgtagacagtcacgtcatgttaggtgtctgtactccatgaggatgagaactctaaatgaggtggtgtatggaaagccgatcataattcatagagtagagtgaacctatgactgcagtggatctcaaaaacttttaaaaccatagacaagccttatagagtagaacattcacagcaaagaagaatcctgtgaatgtccaaaagccttccagaagtcaagtctcttaagctattagaaatattcccactggggatgagggaaaaccccatgaatgcgggaaatgaggcaatatttttaagaaatgacagttcattgtacataagaaaatgctcttaggaatgaagttctatgaaagtactaaatatgggacagtgcaacaagtaaccagactattttgtattttggagaattcatattatggagaacctaacaatttaaagacactgggaacacttgcccctcagtatagtactgtcaagggaagccatacactttttgtagacatgggtaccaaaaatacccaattctaagtggttgacagatgttcactttgaagtgtgaagttttaaaaatacgtgaataaattggttattgaaacatctaagacatttcttagtggtatttgtggcttatcttctagtgtcacgtatgttttgtgttttggacttacctataatttaatgtaattgggagtatgaaatgcatatgccttttagtgcctctgatgtctgtgaagacaacactacacaccactggtttttattttttaacaataatataaaaaatggaaactcatgtaacatgactacatgaataagtaccttaagtgataacccgtttcttttaacttatagacatacataaggggtcttttgtttttatggacctttctattcagtaactgaagccaacattgtgtaagtcttctgcatcctcagagtctgagtaacagtttatataaaataaatatgcaaaggcaggaaccacagaataaccatagtaatatataactgaatgagcaaaataaaggtgtgtgaactacattacaacacccaaactaaatgaaataaagtagtgctgtattaaatctttttctcatttagtgaggtgcctccatatagtatatatatatgtatcttaagtgatatgtaacccaaatgtcactattttaatttactgtgataaagtatcatggatattttgtgctgctgttatgctttttgtgttgcataaaatatcttgtaaaaattagatggataaatgaattattaaaaaatcacatttctgaagatgtaaagtattagggaattttgtgctggaaaaacatttttgacattcaaggatgcctattttatcttctagcaaatttctgtggtccctggaaaagtacagatgatcctggacttacagtggggttacctcccaataaacccattgtaagttgaaaacattgtaagtcaaaaatgcatttaatacacccaacttaccaaacatcatagcttagcgtagcctaccttaaacattctcagaacacattctaatgcatcatctattttataaaaaggtgttgaatatctgatgtaattattgaatactgaaggtgaaaaatagtagtgtatggataccattgtaatgttgagaaactgtaagtcacatcctcttaagtcaggaactatctgtataaggaaacaagatttccattttatcatttgaaatgtatttgactttgtttcactagttgcattatccccatggaaaacttcacattgagaacttaccattatatatttccataaaaatgcatgaaccatcccttagctaagtaaggattttgtaatgttctctcaataatgttgcttggcaaagttaatattttttgtatgctgatgaaatttagaaaagtccaatattgagcttgattgcaaacttagaaaaactcaagacttctccttttatgttcaaattgttgtatcagtatggtattttgcacctttaccttaaacaatattttctcctttaattattgattttgcaacattttgggaaagttggaattttaaataaatgaataattttctaaaccagaataccagttcaacagccaaataattctgtctttccatgctgtaattttaaagcatttaattttccaactttttgttcatactcaagtgtatgaacttcctggctgggcacagtggctcatgcctgtaatcccagcactttgggaggctgaggacctcaagtggagacctcaagtggatcacttgaggtcaggagttgaagaccagcatgttcatggccaacatggcaaaaccctgtcttaaattagccgggcatggttgtgcgtgcctgtaatcccagttactcaggaggctgaggcaggagaatcacttgaacctgagaggcagaggttgcagtgagccaagattgtgcagcctgggcgacagagcgagcctctgtcaaaaaaagaaaagaaaaagaacttcctactttttaatatctcaaattcattttactagacgtgggagaccaactaatgcaaatgaacagttacagggtgatgttgtactttgtgatttttgccctattttttctttccatctatcaccattctctttccaatcccagagattgatttattaggtcttggaaattctagattattccattaactattaagcagttaaacctgatacttcctacactagataatggaacttcaacattagcctattgattgcccaagaacaaacatttttttctaaatgtcaggtgttatggggaggattgatgctgacagcagaggtctagttaaaaactgatgcagaggttcaaatacgttgtgcagtaatcactagaactcaccttctaaagtgtcatgagagctctgattctgcaattagagattttttaatgtgtttttgaaattaccttgtaaaccacaaatctgtgtctctgcattgccccttattgtttcctaccacaaattctacatcaagaagaaagttttaaagttagactggatttatttgtgattttatggagcacaataaggtacattgagatagcatactaaaggaggccaaatacaggaagcatcatcttttcttattctcttactgcctggattttcccactgacctggaattgtgcacagttctacaaaggacaattgacattgttttccttttactaagtagtgggttttccttaaggtccagactgaattttgagacctgtatcaggattgccttctgtgtgactttttcttgcaggatctgacatcattacctatgggtccatatatttgtgatactttggtttcgggaacatcacttttagaatgttgacataaaatgcacccacagaatgccgtatttatcaaaagtaactttctagcaaaatctacagcagtaggcatttggaatctgcatttgagacctctgcagtcatttggtcattccagcaatctatgtccaggttgtcaatttcagaggtcttattagtctatacaggtaccaatgagctttcagatgttcaacacctacccctggcctaactgctgataaccaaccataacccttgcagatgcatgcatgttttctgcaccttgctatcatttttcagtccatttttcacatgtatacatagtgattatttttaaatgcaaccctgatttcacatgcctcatgttgaaatatcgtgtggcttattgtggacttaaagtgtaacattctccttatggtatgtaaggacttttgtataaaccaatgcctatctatctatcatttctgaaaactttttcctcctatgcaatattttctggcctctgtgaacaacttgtagttccttgagatttctattatcacttatgtttttgcaaatctgcaattgaaatgcccttgttccttgttaatgcctattgaatctatatgaacctgtacgtgtgtttctcactgtgataatataatcattgcatgttttatctttcccactagaaagcttctagaaagctagtactatcttttttgtctgtgtaatttttgcatcacaagctatatttaaatgtgggtgcagtgagtggctgttttctgccacatggagaaacatggtctgcagtgagagagaagaatgaagccatgatgaaagcaaaatcaagaaagagtcccgattgtgttccagtacctggttcttctggtcttcatgttcaggtccacctctgcccttttcatgtcttgattgttgaattcttctgtgagatactccaaatatcctaataaattctcatgtttgcttcaaaaa

SEQ ID NO: 1413 - DNA, 2319 bp, Homo sapiens
gagctctaggtcttgttttccctgctttgtgttttctgctcgtggacgcccagcctctgtggccctgtggcctgcaggtattgggagatccacagctaagacgccgggaccccctggaagcctagaaatgggaccattgacatttagggatgtggccatagaattctctctgaaggagtggcaatgcctggacactgcacagcggaatttatatagaaatgtgatgttagagaactacagaaacctggtcttcctgggtattactgtttctaagccagacctgatcacttgtctggagcaagggaaagaggcctggagtatgaagagacatgagatcatggtggccaaacccacagttatgtgttctcattttgcccaagacctttggccggagcagaatataaaagattctttccaaaaagtgacactgaaaagatatggaaaatgtagacatgaaaatttaccattaagaaaaggctgtgaaagtatggatgagtgtaagatgcacaaaggaggttgtaatggacttaaccaatgtctcacagctacccagagcaaaatatttcaatgtgataaatatgtaaaagtcgctcataaattttcaaattcaaacagacatgagataagacatactaaaaagaaacctttcaaatgtacaaaatgtggcaaatcatttggcatgatttcatgcctaactgaacatagcagaattcatactagagtaaatttctacaaatgtgaagaatgtggaaaagcctttaactggtcctcaacccttactaaacataagagaattcatacgggagagaaaccttacaaatgtgaagaatgtggtaaagcctttaaccagtcctcaaaccttattaaacataagaaaattcatactggagagaaaccctacaaatgtgaagaatgtggcaaaacttttaaccgattctcaactcttactacccataagataattcatactggagagaaaccctacaaatgtaaagaatgtggtaaagcttttaaccgatcttcaacccttactacccatagaaaaattcatactggagagaaaccttacaaatgtgaagaatgtggcaaagcctttaagcagtcctcaaaccttactacacataagataattcatactggagagaaaccctacaaatgtaaaaaatgtggaaaagcctttaaccagtctgcacaccttaccacacatgaggtaattcatactggagagaaaccctacaaatgtgaaaaatgtggaaaagcctttaatcatttctcacaccttactacacataagataattcatactggagagaaaccttacaaatgtaaagaatgtggtaaagcttttaaacactcttcaacccttactaaacataagataattcatactggagagaagccttacaaatgtaaagaatgtgaaaaagcttttaaccaatcctcaaaacttactgaacataagaaaattcatactggagagaaaccctatgaatgtgaaaaatgtggcaaagcttttaaccagtcctcaaatcttactagacataagaaaagtcatacagaagagaaaccttacaaatgtgaagaatgtggcaaaggttttaaatggccctcaacccttactatccataagataattcatactggagagaaaccatacaaatgtgaagaatgtggcaaagcttttaaccaatcctcaaaacttaccaaacataagaaaattcatactggagagaaaccctacacatgtgaagaatgtggcaaagcctttaaccagtcctcaaaccttactaaacataagagaattcatactggagaaaaaccttacaaatgtgaagaatgtgacaaagcttttaaatggtcctcagtccttactaaacataagataattcataccggagaaaaattacaaatatgaaaattatggcaaagctttaatcaatttacaagtcttactaaacataagaaaatttatactggagagaaactactaacctgaaagatgtgacaataattttgacaacacctcagacttataaaagtaatcatactggtgagaaattctaaaaatgtgaagactatggcaaagtctttaaatggttgtcacactttaggtaagataattcatattggaacaaactacaagtgcaaacaatgtggcaaaacttaatttatgctcacaccttactgcacagaaaagaatttttagttgagaaaaagtatacaaatataaagaatgtggaaaagccgttaatatctgctcacatcttactcagcatcagaaagtacttaataaaagcattataaatggaaaaaaaaaaa

SEQ ID NO: 1414 - DNA, 3393 bp, Homo sapiens
aaccccgcgcgctgattggccgcgtgggcgaggcggaggagagccgtgcgcagcggcgtatgtggggccgtgtgcagacccgcgtgtggcgcaggcaaggaccctcaaaataaacagcctctaccttgcgagccgtcttccccaggcctgcgtccgagtctccgccgctgcgggcccgctccgacgcggaagatctgactgcagccatgagcagcaatgagtgcttcaagtgtggacgatctggccactgggcccgggaatgtcctactggtggaggccgtggtcgtggaatgagaagccgtggcagaggtggttttacctcggatagaggtttccagtttgtttcctcgtctcttccagacatttgttatcgctgtggtgagtctggtcatcttgccaaggattgtgatcttcaggaggatgcctgctataactgcggtagaggtggccacattgccaaggactgcaaggagcccaagagagagcgagagcaatgctgctacaactgtggcaaaccaggccatctggctcgtgactgcgaccatgcagatgagcagaaatgctattcttgtggagaattcggacacattcaaaaagactgcaccaaagtgaagtgctataggtgtggtgaaactggtcatgtagccatcaactgcagcaagacaagtgaagtcaactgttaccgctgtggcgagtcagggcaccttgcacgggaatgcacaattgaggctacagcctaattattttcctttgtcgcccctcctttttctgattgatggttgtattattttctctgaatcctcttcactggccaaaggttggcagatagaggcaactcccaggccagtgagctttacttgccgtgtaaaaggaggaaaggggtggaaaaaaaccgactttctgcatttaactacaaaaaaagtttatgtttagtttggtagaggtgttatgtataatgctttgttaaagaaccccctttccgtgccactggtgaatagggattgatgaatgggaagagttgagtcagaccagtaagcccgtcctgggttccttgaacatgttcccatgtaggaggtaaaaccaattctggaagtgtctatgaacttccataaataactttaattttagtataatgatggtcttggattgtctgacctcagtagctattaaataacatcaagtaacatctgtatcaggccctacatagaacatacagttgagtgggagtaaacaaaaagataaacatgcgtgttaatggctgttcgagagaaatcggaataaaagcctaaacaggaacaacttcatcacagtgttgatgttggacacatagatggtgatggcaaaggtttagaacacattattttcaaagactaaatctaaaacccagagtaaacatcaatgctcagagttagcataatttggagctattcaggaattgcagagaaatgcattttcacagaaatcaagatgttatttttgtatactatatcacttagacaactgtgtttcatttgctgtaatcagtttttaaaagtcagatggaaagagcaactgaagtcctagaaaatagaaatgtaattttaaactattccaataaagctggaggaggaaggggagtttgactaaagttctttttgtttgtttcaaattttcattaatgtatatagtgcaaaataccatattaaagaggggaatgtggaggactgaaagctgacagtttggacttttctttttgtacttaagtcatgtcttcaataatgaaaattgctgttaaaaggatgtatgggatttagatacttttgcaaagctatagaaaattcactttgtaatctgttataataatgcccttgagttctgtgttcagtctgaacaggttttttggtggtggtggttttgttttgttttggagacggagtctcactcttgtcgcccaggctggagtgcaggcttggctcactgcaacctccacctcccgggttcaagcaattctcctgcctcagcctcctgagtagctgggattacaggcacccgccaccaccccccgctaattttttgtatttttatttttattttatttttttatttttttttgagacagagtgtcgctctgttgcccaggctggagtgtagtggtgcgatctcggctcactgcaagctccgcctcctgggttcgtgccattctcctgcctcagcctcctgagtagctggggctacaggtacccgccaccgcgcccagctaattttttttttttgtatttttagtaaagacggggtttcacggtgttagccaggatggtctcaatctcctgacctcgtgatccgcccgccttggcctcccaaagtgctgggatcacaggcgtgagccaccgcgcccggcctattttttgtatttttagtagagactgggtttcatcatgttggtcgggctggtctccaactcctgacctcaggtgatccacctgccccgccccccaaagtgctagtgttacaggtgcgagccaccgtgtctggccgattctgaacagttttaataccattgctatttttgtgtttttcctgggccttttttttttttttttttttttttgagacagtctcgctctgttgcccaggctagagtgcaatggtgcaatctcagctcactgcaacctccaccccccacccccacaccccgttcaagtaattctcctgcctcagcctcccaaatagctgggattacaggtgtccgccaccacacccagctaatttttgttatttttagtagagatggggtttcactgtgttggtcaggctggtctccaactgttgccctcaggtgagccactgtgccccaccttttcctgggtttcataaggatctgaagtggtggattccttgtttttgctagtgtctcatttagagttgagatggaccttaaaactcatctgttttaactcactttttaatagatgagttaaacttaatttacttaaggatgtacagttagagcctggaacttcaaccattattcactccccatgccctgtttccccccacttcgaaattaaatgcggttagcatcatatagttcattttccccctccatgctgctgtgtgattcttgactttgggtatgagtttttcatccttcatgcagggttctgtcagttcatggtatagtgattcagtgttaaaatggtggtgtctcagctgtgctgtgcacattccaaccttgtcaaattaatagtcctgagcaagcaagaaaaagaggtaataacatacccatttctttatgaatataagcttataatattttttcatgtgctatttttactgagcaaattgtatgtctcacatgttaacacaataaatatcttgacaattttattttctaccataaaaaaaaaaaaaaaa

SEQ ID NO: 1415 - DNA, 706 bp, Homo sapiens
gaattccggtgctcctaaatctggtcttagctgcttcgtgtcttcttctccagcctctgtggccctgtgacctgcaggtattgggagatccacagctgagggaccccccggaagcctagaaatgggaccattggaatttagagatgtggccatagaattctctctggaggagtggcattgcctggacactgcacagcagaatttatatagggatgtgatgttagagaactacagacacctggtcttccttggtattgttgtcactaagccagacctgatcacctgtctggagcaaggaaaaaaacccttcactgtgaagagacatgagatgattgccaaatccccagttatgtgttttcattttgcccaagacctttgtccagagcagagcctaaaagattccttccaaaaagtgatagtgacaagatatgaaaaacgtgaatatggcaatttagagttaaaaaaaggttgtgaaagtgtggatgagggtaaagtacacaaaagaggttataatggacttaaccaatgtttgacagctacccagagcaaagtatttcaatgtgatacatatgtgaaagtctctcatatattttcaaattcaaacagacataagataagagatactggaaaaaaacctttcaaatgtatagaatgtggcaaagctttcaaccagtcctcaacccttgctacacataagaaaattcat

SEQ ID NO: 1416 - DNA, 5403 bp, Homo sapiens
ctcgctgccgccggagtttccaggtctcgacttcactgctctgtgtcctctgctccaggaggcccagcctgtgtggccctgtgacctgcaggtattggagagccacagctaagatgccaggaacccctggaagcctagaaatgggactgttgacatttagggatgtggccatagaattctctccggaggagtggcaatgtctggacactgcacagcagaatttatataggaatgtgatgttagagaactacagaaacctggccttcctgggtattgctctctctaagccagacctgattacttatctggagcaaggaaaagagccctggaatatgaagcaacatgagatggtggatgaacccacaggtatatgtcctcattttcctcaagacttttggccagagcagagcatggaagattcttttcaaaaagtattactgagaaaatatgaaaaatgtggacatgagaatttacagttaagaaaaggttgtaaaagtgtggatgagtgtaaggtgcacaaagaaggttataataaacttaaccagtgtctcacaactgcccagagcaaagtatttcaatgtgggaaatatttgaaagtcttctataaatttttaaattcaaacagacatacgataagacatactggaaagaaatgcttcaaatgtaaaaaatgtgtcaagtcattttgcatccgtttacacaaaacccaacataaatgcgtttatattacagagaagtcctgtaaatgtaaagaatgtgaaaaaacctttcattggtcctcaacccttactaatcataaggaaattcatactgaagataaaccctacaaatgtgaagaatgtggcaaagcttttaagcagctctcaacccttactacacataaaataatctgtgctaaagagaaaatctacaagtgtgaagaatgtggcaaagcatttctatggtcctcaaccctaactagacataagaggatacacactggagagaaaccctacaaatgtgaagaatgtggcaaagcttttagccattcttcaacccttgctaaacataagagaattcatactggagagaaaccctacaaatgtgaagaatgtggcaaagcttttagccgttcttcaacccttgctaaacataagagaattcatactggagagaaaccctacaaatgtaaagaatgtggcaaagcttttagcaattcctcaacccttgctaatcataagataactcatactgaagagaaaccctacaaatgtaaagaatgtgacaaagcttttaagcgactctcaacccttactaaacataaaataatacatgctggagagaaactctacaaatgtgaagaatgtggcaaagcttttaatcgatcttcaaatcttactatacataagtttattcatactggagagaaaccttacaagtgtgaagaatgtggcaaagcatttaactggtcctcaagccttactaaacataaaagatttcatactagagagaaacccttcaaatgtaaagaatgtggcaaagcatttatatggtcttcaaccctaactagacataagaggatacacactggagagaagccctacaaatgtgaagaatgtggcaaagcttttaggcaatcctcaacccttactaaacataagataattcatactggagagaaaccctacaaatttgaagaatgtggcaaagcttttagacaatccttaacccttaataaacataagataattcatagtagagagaaaccctacaaatgtaaagaatgtggcaaagcttttaagcaattctcaacccttactacacataaaataattcatgctggaaagaaactctacaaatgtgaagaatgtggcaaagcttttaatcattcctcaagtctttctacacataagataattcatactggagagaagtcttacaagtgtgaagaatgtggcaaagcatttctatggtcctcaaccctaagaagacataagaggatacacactggagagaaaccctacaaatgtgaagaatgtggcaaagcttttagccattcttcagcccttgctaaacataagagaattcatactggagagaaaccctacaaatgtaaagaatgtggcaaagcttttagcaattcctcaacccttgctaatcataagataactcatactgaagagaaaccctacaaatgtaaagaatgtgacaaaacttttaagcgactctcaacccttactaaacataaaataatacatgctggagagaaactctacaaatgtgaagaatgtggcaaagcttttaatcgatcttcaaatcttactatacataagtttattcatactggagagaaaccttacaagtgtgaagaatgtggcaaagcatttaactggtcctcaagccttactaaacataaaagaattcatactagagagaaacccttcaaatgtaaagaatgtggcaaagcatttatatggtcttcaaccctaactagacataagaggatacacactggagagaagccctacaaatgtgaagaatgtggcaaagcttttagccgttcctcaacccttactaagcataagacaattcatactggagagaaaccctacaaatgtaaagaatgtggcaaagcttttaagcactcctcagcccttgctaaacataaaataatacatgctggagagaaactctacaaatgtgaggaatgtggcaaagcttttaatcaatcttcaaatcttacgacacataagataattcatactaaagagaaaccttccaagagtgaagaatgtgacaaagcatttatctggtcctcaacccttactgaacataagagaattcataccagagagaaaacctacaaatgtgaagaatgtggcaaagcatttagccagccttcacaccttactacacataagaggatgcacactggagagaaaccctacaaatgtgaagaatgtggcaaagcttttagccaatcctcaacccttactacacataagataattcatactggagagaaaccctacaaatgtgaagaatgtggcaaagcttttaggaaatcttcaactcttactgaacataagataattcatactggagagaaaccctacaaatgtgaagaatgtggcaaagcatttagccaatcctcaaccctaactagacatacgaggatgcacactggagagaaaccatacaaatgtgaagaatgtggcaaagcttttaatcgatcctcaaagcttactacacataagataattcatactggagagaaaccttacaagtgtgaagaatgtggcaaagcatttatatcatcctcaaccctaaatggacataagagaattcatactagagagaaaccctacaaatgtgaagaatgtggcaaagcatttagccaatcttcaaccctaactagacataagaggttgcacaccggagagaaaccctacaaatgtggagaatgtggcaaagcctttaaagagtcctcagctcttactaaacataagataattcacactggagagaaaccctacaaatgtgaaaaatgtggcaaagcctttaaccagtcttcaatccttactaaccataagaaaattcatactatcacacctgtaatcccactactttgggaggccgaggcgggcggatcacgaggtcaggagatggagaccatcctggctaacacagtgaaaccccttctctactaaaaaatacaaaaaattagccgggcgtggtggcgggcgcctgtagtcccagctatgcgagaggctgaggcaggagaatggcgtgaacccgggaggcggagcttgcagtgagccgagatcacgccactgcactcaagcctgggcgacagagcgagactccgtctcaaaaaaaaaaaaaagaaaattcatactagagagaaaccctacaaatataaagaatgtggcaaatcttttaaccggtcttcaacctttactaaacataaggtaattcatactggagtaaaactctacaaatgtgaagaatgtggcaaatcctttttctggtcctcagccctaaccagacataagaaaattcatactggacagcaaccctacaaacaggaaaaatttggcaaagcctttaaccagttttcacaccttactacagataagataactcatattggagagaaatcttacaagtgtgaataatgtggtaaagtctataaaaagtcctgaattcttaacagacataatattattcatactggagagaaactctacaaacctgaaagatgtgccaacgcttttgacaagtcaaacttttctaaacatcaagaaaatcatgctgctgagaaatcctagaaatgtgaagaatgtgacaaagcctctaaatgattgtcacacttgatcgtaggtaagataattcatactggagaaaactaccagtgtgaacaatgtggccaagctttgaactaatgctcacaccttaatgcataggaaagcatttatgcttgagaaaaagtgaacaaatatagacaaaaagccattaatacctgctcacatcgtactcaaattcagagcgttcatactaaataagaagtgtaattactgtcaaacgactgatcagaaaatatgtctttaaagtacagaagagtattttgaaaaagcattacaaatatgaagaggcattatttatgaccttttctatggaaaggtaaggacattaaaaatgtaagatgcatgatgaaaatttaagtagagaggatctttatggttaacttataatatcgagtgatgcatgaggtagatgttcagattaatattctgcattattatgaaagaaaaacattcttaattttagttaaagtttagtatgatttattgtatttttatgaaatatatgtagcatatttttaaattataaattgcatgtgaacttttcaaccaaacagttttaacatgttaaatactatcatgaattcaatgaagtgttattatgccagtaactttaacctattccaccttactcaagggtgtaggtaaaagatggtaaaaatacactatttggtaagataatggactgacatctctagtgattttttttgccagtgagttttaattgccattaagttaaagaatattgttcccataggctaaatttttatttttattttctcatttaaatgtatttgacttaatttttgtggatacctaatatgtgtacatattatgccatatgtggcatattttgatacggacacacaatatataacaatcgcattagactaaatgcggtctccattacctctagcatttattctttgtattacaaataattcaattctacagttttagttatttttaaatgtacaattaaattgttgttgactacaggattatttttatggtcataataaaacttatatacaaacataagtaaaatccataaaaaaaa

SEQ ID NO: 1417 - DNA, 582 bp, Homo sapiens
gaattccgataaaggctcgccgctgtgaccctgttacctgcaagaacttggaggttcacagctaagacgccaggaccccctggaagcctagaaatgggaccactgacatttagggatgtgaaaatagaattctctctagaggaatggcaatgcttggacactgcgccaggaaatttatatagagatgtgatgttagagaactacagaaacctggtcttccttgttatgtgttctcattttgcccaagatgtttggccagagcacagcataaaagattctttccaaaaagtgatactgagaacatatggaaaatatggacatgagaatttacagctaagaaaagaccataaaagtgtggatgcatgtaaggtgtacaaaggaggttataatggacttaaccagtgtttgacaactactgacagcaagatatttcagtgtgataaatatgtgaaagtctttcataaatttccaaatgtaaatagaaataagataagacatactggaaagaaacctttcaaatgtaaaaaccgtggcaaatcattttgcatgctttcacaattaactcaacataagaaaattcat

SEQ ID NO: 1418 - DNA, 843 bp, Homo sapiens
caatttagagatgtggccatagaattctctctggaggagtggcattgcctggacactgcacagcggaatctatataggaatgtgatgttagagaactacagtaacctggtcttccttggtattgttgtctctaagccagacctgatcgcccatctggagcaaggaaaaaaacctttgactatgaagagacatgagatggtagccaacccctcagggccaggtgtggttgtggtgctcatgtgtaatcccaggattttgggaggtcaagccaagaggatccctggagcccaaaagtttgagaaccagcctgggcaacatatggagacccctctctatgaaaaaatttaataatagccaggcatggtggtgtgcagctgtggtcccagctacttgggagattgaagggagtcaaaattgtgccactacactccagcttgggtgacagagtgagaccctatctcaaaaaaaagcctgttcatttcagttatatgttctcattttgcccaagatctttggccagagcataacataaaagattctttccaaaaagtgatactgagaagatatgaaaaacgtggacatggaaatttacagttaataaaaaggtgtgaaagggtagatgagtgtaaggtgcacacaggaggttataatggacttaaccagagtagtacaactacccagagcaaagtatttcaatgtgataaatatgggaaagactttcataaattttcaaattcaaatagacataatataagacatactgaaaaaaaacctttcaaatgcatagaatgtggcaaagcttttaaccagttctcaacccttataacacataagaaaattcat

SEQ ID NO: 1419 - DNA, 5225 bp, Homo sapiens
gcctttggcttcagcgcttcgcccccgcgctgtgccctctgtcggcggcgtggggcagctgtagcagcgttggcggcaggaggcggcggccgcgtcgacgtcgacccagactggagcgacgtttaaagaaggggcagaatcgctggggagtgcggcttcttcttgttgggggactcccagccttccgcgcgtccggaggaggagaagcggcggcgccgggaagcaggcatggagagtagaaaactgatttctgctacagacattcagtactctggcagtctgctgaactccttgaatgagcaacgtggccatggactcttctgtgatgttaccgttattgtggaagaccgaaaattccgggctcacaagaatattctttcagcttctagtacctacttccatcagctcttctctgttgctgggcaagttgttgaactgagctttataagagcagagatctttgcagaaattctcaattatatctatagttctaaaattgttcgtgttagatcagatttgcttgatgagttaattaaatcagggcagttattaggagtgaaatttatagcagagcttggtgtcccattgtcacaggttaaaagcatctcaggtacagcgcaggatggtaatactgagcctttacctcctgattctggtgacaagaaccttgtaatacagaaatcaaaagatgaagcccaagataatggggctactataatgcctattataacagagtctttttcattatctgccgaagattatgaaatgaaaaagatcattgttaccgattctgatgatgatgatgatgatgtcattttttgctccgagattctgcccacaaaggagactttgccgagtaataacacagtggcacaggtccaatctaacccaggccctgttgctatttcagatgttgcacctagtgctagcaataactcgccccctttaacaaatatcacacctactcagaaacttcctactcctgtgaatcaggcaactttgagccaaacacaaggaagtgaaaaattgttggtatcttcagctccaacacatctgactcccaatattattttgttaaatcagacaccactttctacaccaccaaatgtcagttcttcacttccaaatcatatgccctcttcaatcaatttacttgtgcagaatcagcagacaccaaacagtgctattttaacaggaaacaaggccaatgaagaggaggaggaggaaataatagatgatgatgatgacactattagctccagtcctgactcggccgtcagtaatacatctttggtcccacaggctgatacctcccaaaataccagttttgatggatcattaatacagaagatgcagattcctacacttcttcaagaaccactttccaattccttaaaaatttcagatataattactagaaatactaatgatccaggcgtaggatcaaaacatctaatggagggtcagaagatcattactttagatacagctactgaaattgaaggcttatcgactggttgcaaggtttatgcaaatatcggtgaagatacttatgatatagtgatccctgtcaaagatgaccctgatgaaggggaggccagacttgagaatgaaataccaaaaacgtctggcagcgagatggcaaacaaacgtatgaaagtaaaacatgatgatcactatgagttaatagtagatggaagggtctattatatctgtattgtatgcaaaaggtcatatgtctgtctgacaagcttgcggagacattttaacattcattcttgggagaagaagtatccgtgccgttactgtgagaaggtatttcctcttgcagaatatcgcacaaagcatgaaattcatcacacaggggagcgaaggtatcagtgtttggcctgtggcaaatctttcatcaactatcagtttatgtcttcacatataaagtcagttcatagtcaagatccttctggggactcaaagctttatcgtttacatccatgcaggtctttacaaatcagacaatatgcatatctttccgatagatcaagcactattcctgcaatgaaggatgatggtattgggtataaggttgacactggaaaagaacctccagtagggaccactacatctactcagaacaagccaatgacctgggaagatatttttattcagcaggaaaatgattcaatttttaaacaaaatgtaacagatggcagtactgagtttgaatttataataccagagtcttactaaactcctttgaaatactagaaagttttgttttggatgatggggcaggggtttcagaagatctgtaaaacaaattaaggtgcgaacaagttaatttgatctgccacattatctgaaggaagtgtagtgggatttttgttgataatttttagaagcaaattttcctgaaagttttgagtagaggtgagaccccctccccaagtatctgtttatatagttagttttcagctcatttaaaagaggcaaaaattaaaagcttggagagatagtttcctgaatagaatttgaagcagtctgaatgttctttgaaaataactggagttattagcataccctagtacatcttacagctttccccttccatgttagcactttactgctgaattctcaattttcttaacattgagacaataaatgtgtgttttgtcttgtatatggcataaagagtaaataagttttagagttgttctggaaaatgtcagaataagtcagtacttgggttgtgtaatctgctagtccaagcgaacagcaacctcctgctaccctccctctatgaaaatagccatgcagacaagtctctcatctgaagaacaaattagatttagctaattagaattaatcctggctttcattgccatagtctgtaaaagactttggtggctagaccactttataccttcgcagtgtggtctctgggggcaaaaaactaatgaaaacaatctctgtaatggcagataggaggagatgaaaagttctgttgcatggatttttaattctctggctaccacatagtagagaatggaatgaagatttccttttggcttcttaaggttaaaaatattcccatgaacatgaaaattttcaaattttgaatctgaaagccaccaaatgtatctttatgtataaatccttgtaaatgatagattccatgggtgagactttacatattttgggtgggaggctactggcatatatttttaaatgttcatattgcgtagaatctccactaggaagtctttatttgaaatagttgaatcagtgatctagtattttcctttcggcaagatttgttaggtttttaccccttctaaaataagttttattccatctgcaaattgctgcaatattatagtaatcagaaactacataaggaatgttatataggcttgtcagttcccatttttcttgacaacaataaataccacttttaaaaatgacacatatttaaacacttagaaaataaagttaacacttactgaagtgctagtactaaactgtgctagtactaaaagaaaacaggttggaacatacatatagcctagcatttataacagaattgttgaacgtctgtaaatgattttttttttttttgcaaaggaaaaaattgatactggaaaagattgttgtgcatagttattagtcatttgtaaccttgcttaagtatttcttagtccaacatagatattttctttctcctgaccatgtattttaaaatatagtctatttcttgactttgaacttaaagctttaatcataatttctcatgtatacatcgttcttctgatggtaagctggatttgaaggtagtggtttcagtgtttcttaagttggtagctgagggtatcaggcatcagttcatgcaataatacaagaaaaaaaatcctttgcttgccaagaggtagagtgatgtgcatttatctgttttctgttctgtaagtctagaccttcaaaccatttgtaaactaacccctgggaaatttgaaattacctgataacttaagactctgtgatctctggaatcaccatatgtttcttttttgtgtagatattaataacattactctttgactatagtgtgcactctgaaatgtactcagtgaaaatttgttttgagtttcattaatgctatttcaccagttagacataattacttctaccgatgtgaatgatacggatgccggcagagcttccagatctttcagactcaactgctaggtcaattagtttgtcataataaaacttggcagattctacaagtctattatgacaaaccaggaactaattctataatggaaaactatccattctgaataataggtatgtaattatttgctgctgctgctgtgctctgtaaattctgaatatgacatttaaactctgtgcctactaaaggtatcttctggagtttttgggaggagagaaactggaaaattaaattgtatttttgccagaagactcttacttgcatgtgtctcagggtcttcagtttttctataagtttccatatccaaagttcagaattcatgtgaaatacttctttggggcaaaagtccttcattcctggtatttattggattggaaatctgtagcaagatgctgtttaaaattaccatattgtttttttatcttatacttagctctctggctattgaacttccttttcttgtttgaagttagcttcaaatttgctcctatgctaaattacctgtaaatattctggataggaactacttgaaatagtaatttgttaaaagatatgacaaaatgaaaatgcttaaactacagaaatttaaaaatgccataacaatcttgcgagactaactttaaaatatactttaaatgattattatgattttggtggtaacgatcccccacacacaaccactatgaagaaataatgccgcatttttcccccattgtaccaaaaagataaaaaaatggtaaacactgatcaaggtattttgtattgtcaaggcatgcatattctaaagaattaaatgctaacttaacagcactggctttctggctggtcaactatatgaaaccttgttcattcctccgagtactgtaatgttcacacttgtacaatcttccctgtcatgactttaagttctacttttcattaaccatggcctgatattagttcttagagcttcttgtggcaaaaataaaatgatttaattctaaaaaaaaaaaaaaaa

SEQ ID NO: 1420 - DNA, 6202 bp, Homo sapiens
gaattccggcgtcgcggacgcatcccagtctgggcgggacgctcggccgcggcgaggcgggcaagcctggcagggcagagggagccccggctccgaggttgctcttcgcccccgaggatcagtcttggccccaaagcgcgacgcacaaatccacataacctgaggaccatggatgctgatgagggtcaagacatgtcccaagtttcagggaaggaaagcccccctgtaagcgatactccagatgagggcgatgagcccatgccgatccccgaggacctctccaccacctcgggaggacagcaaagctccaagagtgacagagtcgtggccagtaatgttaaagtagagactcagagtgatgaagagaatgggcgtgcctgtgaaatgaatggggaagaatgtgcggaggatttacgaatgcttgatgcctcgggagagaaaatgaatggctcccacagggaccaaggcagctcggctttgtcgggagttggaggcattcgacttcctaacggaaaactaaagtgtgatatctgtgggatcatttgcatcgggcccaatgtgctcatggttcacaaaagaagccacactggagaacggcccttccagtgcaatcagtgcggggcctcattcacccagaagggcaacctgctccggcacatcaagctgcattccggggagaagcccttcaaatgccacctctgcaactacgcctgccgccggagggacgccctcactggccacctgaggacgcactccgttggtaaacctcacaaatgtggatattgtggccgaagctataaacagcgaagctctttagaggaacataaagagcgctgccacaactacttggaaagcatgggccttccgggcacactgtacccagtcattaaagaagaaactaatcacagtgaaatggcagaagacctgtgcaagataggatcagagagatctctcgtgctggacagactagcaagtaacgtcgccaaacgtaagagctctatgcctcagaaatttcttggggacaagggcctgtccgacacgccctacgacagcagcgccagctacgagaaggagaacgaaatgatgaagtcccacgtgatggaccaagccatcaacaacgccatcaactacctgggggccgagtccctgcgcccgctggtgcagacgcccccgggcggttccgaggtggtcccggtcatcagcccgatgtaccagctgcacaagccgctcgcggagggcaccccgcgctccaaccactcggcccaggacagcgccgtggagaacctgctgctgctctccaaggccaagttggtgccctcggagcgcgaggcgtccccgagcaacagctgccaagactccacggacaccgagagcaacaacgaggagcagcgcagcggtctcatctacctgaccaaccacatcgccccgcacgcgcgcaacgggctgtcgctcaaggaggagcaccgcgcctacgacctgctgcgcgccgcctccgagaactcgcaggacgcgctccgcgtggtcagcaccagcggggagcagatgaaggtgtacaagtgcgaacactgccgggtgctcttcctggatcacgtcatgtacaccatccacatgggctgccacggcttccgtgatccttttgagtgcaacatgtgcggctaccacagccaggaccggtacgagttctcgtcgcacataacgcgaggggagcaccgcttccacatgagctaaagccctcccgcgcccccaccccagaccccgagccaccccaggaaaagcacaaggactgccgccttctcgctcccgccagcagcatagactggactggaccagacaatgttgtgtttggatttgtaactgttttttgttttttgtttgagttggttgattggggtttgatttgcttttgaaaagatttttatttttagaggcagggctgcattgggagcatccagaactgctaccttcctagatgtttccccagaccgctggctgagattccctcacctgtcgcttcctagaatccccttctccaaacgattagtctaaattttcagagagaaatagataaaacacgccacagcctgggaaggagcgtgctctaccctgtgctaagcacggggttcgcgcaccaggtgtctttttccagtccccagaagcagagagcacagcccctgctgtgtgggtctgcaggtgagcagacaggacaggtgtgccgccacccaagtgccaagacacagcagggccaacaacctgtgcccaggccagcttcgagctacatgcatctagggcggagaggctgcacttgtgagagaaaatactatttcaagtcatattctgcgtaggaaaatgaattggttggggaaagtcgtgtctgtcagactgccctgggtggagggagacgccgggctagagcctttgggatcgtcctggattcactggctttgcggaggctgctcagatggcctgagcctcccgaggcttgctgccccgtaggaggagactgtcttcccgtgggcatatctggggagccctgttccccgctttttcactcccatacctttaatggcccccaaaatctgtcactacaatttaaacaccagtcccgaaatttggatcttctttctttttgaatctctcaaacggcaacattcctcagaaaccaaagctttatttcaaatctcttccttccctggctggttccatctagtaccagaggcctcttttcctgaagaaatccaatcctagccctcattttaattatgtacatctgtttgtagccacaagcctgaatttctcagtgttggtaagtttctttacctaccctcactatatattattctcgttttaaaacccataaaggagtgatttagaacagtcattaattttcaactcaatgaaatatgtgaagcccagcatctctgttgctaacacacagagctcacctgtttgaaaccaagctttcaaacatgttgaagctctttactgtaaaggcaagccagcatgtgtgtccacacatacataggatggctggctctgcacctgtaggatattggaatgcacagggcaattgagggactgagccagaccttcggagagtaatgccaccagatcccctaggaaagaggaggcaaatggcactgcaggtgagaaccccgcccatccgtgctatgacatggaggcactgaagcccgaggaaggtgtgtggagattctaatcccaacaagcaagggtctccttcaagattaatgctatcaatcattaaggtcattactctcaaccacctaggcaatgaagaatataccatttcaaatatttacagtacttgtcttcaccaacactgtcccaaggtgaaatgaagcaacagagaggaaattgtacataagtacctcagcatttaatccaaacaggggttcttagtctcagcactatgacattttgggctgactacttatttgttaggcgggagctctcctgtgcattgtaggataattagcagtatccctggtggctacccaatagacgccagtagcaccccgaattgacaacccaaactctccagacatcaccaactgtcccctgcgaggagaaatcactcctgggggagaaccactgacccaaatgaattctaaaccaatcaaatgtctgggaagccctccaagaaaaaaaatagaaaagcacttgaagaatattcccaatattcccggtcagcagtatcaaggctgacttgtgttcatgtggagtcattataaattctataaatcaattattccccttcggtcttaaaaatatatttcctcataaacatttgagttttgttgaaaagatggagtttacaaagataccattcttgagtcatggatttctctgctcacagaagggtgtggcatttggaaacgggaataaacaaaattgctgcaccaatgcactgagtgaaggaagagagacagaggatcaagggctttagacagcactccttcaatatgcaatcacagagaaagatgcgccttatccaagttaatatctctaaggtgagagccttcttagagtcagtttgttgcaaatttcacctactctgttcttttccatccatccccctgagtcagttggttgaagggagttattttttcaagtggaattcaaacaaagctcaaaccagaactgtaaatagtgattgcaggaattcttttctaaactgctttgccctttcctctcactgccttttatagccaatataaatgtctctttgcacaccttttgttgtggttttatattgtaacaccatttttctttgaaactattgtatttaaagtaaggtttcatattatgtcagcaagtaattaacttatgtttaaaaggtggccatatcatgtaccaaaagttgctgaagtttctcttctagctggtaaagtaggagtttgcatgacttcacactttttttgcgtagtttcttctgttgtatgatggcgtgagtgtgtgtcttgggtaccgctgtgtactactgtgtgcctagattccatgcactctcgttgtgtttgaagtaaatattggagaccggagggtaacaggttggcctgttgattacagctagtaatcgctgtgtcttgttccgccccctccctgacaccccagcttcccaggatgtggaaagcctggatctcagctccttgccccatatcccttctgtaatttgtacctaaagagtgtgattatcctaattcaagagtcactaaaactcatcacattatcattgcatatcagcaaagggtaaagtcctagcaccaattgcttcacataccagcatgttccatttccaatttagaattagccacataataaaatcttagaatcttccttgagaaagagctgcctgagatgtagttttgttatatggttccccaccgaccatttttgtgcttttttcttgttttgttttgttttgactgcactgtgagttttgtagtgtcctcttcttgccaaaacaaacgcgagatgaactggacttatgtagacaaatcgtgatgccagtgtatccttcctttcttcagttccagcaataatgaatggtcaacttttttaaaatctagatctctctcattcatttcaatgtatttttactttaagatgaaccaaaattattagacttatttaagatgtacaggcatcagaaaaaagaagcacataatgcttttggtgcgatggcactcactgtgaacatgtgtaaccacatattaatatgcaatattgtttccaatactttctaatacagttttttataatgttgtgtgtggtgattgttcaggtcgaatctgttgtatccagtacagctttaggtcttcagctgcccttctggcgagtacatgcacaggattgtaaatgagaaatgcagtcatatttccagtctgcctctatgatgatgttaaattattgctgtttagctgtgaacaagggatgtaccactggaggaatagagtatccttttgtacacattttgaaatgcttcttctgtagtgatagaacaaataaatgcaacgaatactctgtctgccctatcccgtgaagtccacactggcgtaagagaaggcccagcagagcaggaatctgcctagactttctcccaatgagatcccaatatgagagggagaagagatgggcctcaggacagctgcaataccacttgggaacacatgtggtgtcttgatgtggccagcgcagcagttcagcacaacgtacctcccatctacaacagtgctggacgtgggaattctaagtcccagtcttgagggtgggtggagatggagggcaacaagagatacatttccagttctccactgcagcatgcttcagtcattctgtgagtggccgggcccagggccctcacaatttcactaccttgtcttttacatagtcataagaattatcctcaacatagccttttgacgctgtaaatcttgagtattcatttacccttttctgatctcctggaaacagctgcctgcctgcattgcacttctcttcccgaggagtggggtaaatttaaaagtcaagttatagtttggatgttagtatagaattttgaaattgggaattaaaaatcaggactggggactgggagaccaaaaatttctgatcccatttctgatggatgtgtcacaccttttctgtcaaaataaaatgtcttggaggttatgactccttggtgaaa

SEQ ID NO: 1421 - DNA, 9443 bp, Homo sapiens
gggcttggcttggagggggcaagggagggaaagagagaagggggaaacacaaaaaacttctttctttctccctccgtttatcttcagcccgacattgtcacctcctctttgaggggttagaagaagctgagatctcccgacagagctggaaatgcattgcactttgactatggaaacagaggctattgatggctatataacgtgtgacaatgagctttcacccgaaagggagcactccaatatggcaattgacctcacctcaagcacacccaatggacagcatgcctcaccaagtcacatgacaagcacaaattcagtaaagctagaaatgcagagtgatgaagagtgtgacaggaaacccctgagccgtgaagatgagatcaggggccatgatgagggtagcagcctagaagaacccctaattgagagcagcgaggtggctgacaacaggaaagtccaggagcttcaaggcgagggaggaatccggcttccgaatggtaaactgaaatgtgacgtctgtggcatggtttgcattgggcccaatgtgcttatggtacataaaaggagtcacactggtgaacgccccttccactgtaaccagtgtggagcttcttttactcagaagggcaaccttctgagacacataaagttacactctggagagaagccgttcaaatgtcctttctgtagctacgcctgtagaagaagggacgccctcacaggacacctcaggacccattctgtgggtaaacctcacaagtgcaactactgtggacgaagctacaagcagcgcagttcactggaggagcacaaggaacgctgccacaactatctccagaatgtcagcatggaggctgctgggcaggtcatgagtcaccatgtacctcctatggaagattgtaaggaacaagagcctattatggacaacaatatttctctggtgccttttgagagacctgctgtcatagagaagctcacggggaatatgggaaaacgtaaaagctccactccacaaaagtttgtgggggaaaagctcatgcgattcagctacccagatattcactttgatatgaacttaacatatgagaaggaggctgagctgatgcagtctcatatgatggaccaagccatcaacaatgcaatcacctaccttggagctgaggcccttcaccctctgatgcagcacccgccaagcacaatcgctgaagtggccccagttataagctcagcttattctcaggtctatcatccaaataggatagaaagacccattagcagggaaactgctgatagtcatgaaaacaacatggatggccccatctctctcatcagaccaaagagtcgaccccaggaaagagaggcctctcccagcaatagctgcctggattccactgactcagaaagcagccatgatgaccaccagtcctaccaaggacaccctgccttaaatcccaagaggaaacaaagcccagcttacatgaaggaggatgtcaaagctttggatactaccaaggctcctaagggctctctgaaggacatctacaaggtcttcaatggagaaggagaacagattagggccttcaagtgtgagcactgccgagtccttttcctagaccatgtcatgtacaccattcacatgggttgccatggctaccgggacccactggaatgcaacatctgtggctacagaagccaggaccgttatgagttttcatcacacattgttcgaggggagcacacattccactaggccttttcattccaaaggggacccctatgaagtaaagaactgcacatgaagaaatactgcacttacaatcccacctttcctcaaatgttgacataccttttattttttttaatattattactgttgataattcttattttgtggaggcagtgtcatttgctctgcctaattacgataaggaagaaacagaagagagaaggggcgggaatattgtttctttatcacctggcttgtttattttgtgggaatttaagagcagtccatttctaccaaggcatatcatgctttgaaaaatcacttgattcataaagattcacctaagagattctgatttgccactgatattcagaattatgatggaagacaggaaagttcagagttttctgggtaggactttggtggtttaaaaatggtataagtaactttattcttgaaagaagaatgtgtttcaaactgtaaaccaattttttgttcttcagagatcatggaacacaaacacattgttattttcagtgataactcctaagaggagctgagttgttgtgggttctatgtttacttcccctatggaatttataattcagtatgttttacactgtaccatatagcaaaacttttaaactacaggtagttaagggccacctacaatacatctgaggtcctgtgatcttatttttctaaacgtaagcactgtttttccatagttttgatgactggcattttatagacaccctggcagccttacttttaacacctttaaggaatagtatttttatgtagttttcagaataacatatggtctaagagtggataaaaggcagtcaataatttctgggagggacttctactttcataaatttgtttgagaggttttcttttaaagttgtaatgtgatggcagcatagtatatgtatttgtttctaaaagtatgcttacgattgtcactttatcagcatttaatcagtgttaaccagtcagcagaaaaatataattatgctaacagtagggggagaaaacccacttagaaatcccttttctggtatttctcttttcactagtttttttcaagatgtgacctcccggtgttctgtccatagttcattcatcctttactcttcgagtagaaggtcttaaaagtcttcctgtcggctgtttctttcaaaatctcctcagagcaattgctaatttggcctgaatctggtaacttgaaccctgtaaggttacagaactagggctatttattttagcatttcttcagtagtatttactactcttgttgcaaagaaaagggaatgggacttctttgtaacctgtaccttggacaacagataaaagaaacaaaaaaataagaaagtttacttttacccttcttggagtctagaatgtgacagaacccccaaaggaaagtcctgcacatttttctgtttccaaaacatttaattgtgtaagtccttgtcagaaatgaatctcaatcccttagtatagaattccccttacatggtataggttgccatatttcatgtgcagattttaatttcatttatgtgggcgctctgttttttctttgcagtccagccacattagaggggaggaaccgagtgatattgattcaagtcattttagggggacatacttggaaggcagaacttgctgcttctgtttggggaggacagacctgactgtgactggattatctgataaccatttgtgaatactgaaattctgttaggcagtaactgataactgctctaaaggatcattaaataggatgctgaaattatgtatcttaatacagtgtggtatgagaattaccaagtcaagagaattgtggacataagcaagtttggccccaatactgctcttaactcattttccagcttactatttgctatttaaatggtaggcaccagctaagcacttctaagcactaacacagctagaactaggcaaaaatggttagaactcagctctcttctactagtccctgtcataattatttttgggaaaatgtccaaactgccccctttaaatctaagggaatgcaccaaaacagagatatatagaatgtcaaccatttcatttttttttttctgcatgccttggtacatagtgaacatacaacctatttaaagataaagcatgtttttgagactcgctcacccccccccacccaaccactcccaaataataattgggatgccattttttttccttttggatgaggtaaataattttaaggttcacaattttgtcttttactgcaatttaaggaaacatttggatgtcagtcaatatgttcataattttggctgtgtgcgaatttctgctggcattatctatgaattttcttcctacttatttttttttcagtatatgaacaatcatgtatctacctgccccaggatgaaactaaatttaggtggaccctaaaccttatgaagacagtgctgaggcactttccttttctgatttcatctttttgggaatctgttttattgaaggtagttagtagttgagagtgcatttgctacaagcatatacttgtatcttcctagcttcatgaggaacagaaagaggtggatatggctcagggtgtggcagggacaattgaggacaaagtcaattcaaatttgtgggtcagaaagaatttttgtggacgtagtgtttttggagaaactctggatggttatatgtgcatgccttttcttcaaaaggaaatacgcaaggttgtagcatctaaaaataaacataagagtcagacaccaaataaatcaagttttacataacagttgtatgcccagtttgtttaggtgagatttcacattacagaaagtatttgaggagcatgaaaatgggttatcttctgtattttccagtttggcaaaagttcagaatttcatcacattgctttgccctaattttgcccagaattttatcttagcctctctctgacagtgatgaatcatgctcaaaagccattctaattggacctttttaagacagggaaagggatcagtaggcggattggaagaaatttcaagtcattgaaatattccattgagatttcctaaagggacaaaattgggaaaataagaaactacgacttagatttggctacgtagtagaaagtatctcccctacatacatacaggcaattgtatgtatgaatcatagggtatatgtgtgtgtatactacacacacattcttttaaagagaattcatggaaaaaaaagcagttggagtgatcagatgtattgcaaaaacatacagagaatttaaatgacagttaataccaagaaattagttgggtttactttatcaggtcgtaataggaatcactaaagaagttactagtgtgtctttaggaccagtggcaactcttaaactaaaactttgggtccttattatctacttacagaacaaagtgaaacaaacaatgattaagctgattggatatacattcaaagatatttaatgtaaagttttttggaatacgaagaaaattcagaaaataaatattatcaacagttacttattggcaaatagagaaagacaagaatagtttagtgagcccggtattttgtttttatagtttttatctcagttgtacaactcacaaaaccatgaagtctttggtattttataaatgtttaacaaaatttacatcagattaaggcatttagatgaaaattattatgttctcactatcttccaaattttatttcatcctatctccaaaatgatttcttagggtacaaaaagagcagacggggctgtaaaaatacaagcaaaaaactgtgtgcccctagtttcaggcagaacttaaactgtcagaggtactagctacatgatttgttttttaactttggattgttcacgtccaaaaatggataaattacatttgtgtttatcatcagttgcattttatgtattattttaataaatactatctgaatgaagactattctaaaccagaaaattccccaaatccaaaagaaaaaaaaagtgggaagaggtgaaattgaagtttgtgtatatgaaagttatcttagacatatttttaattctccagtttctgcaaaataattaaaatatacagtaactggtctcctaaatcctgaatttaatgtattaaatacttatgttctttatattggtgcctttttaaaatgcattgagagtgttggttagctgttgcagctgtacaacacttttaatatgcatttttaaaaatcacttaaaattgagtactatataattcatctctgcatttttagtgcaaatctttagagcaatttctaatagagaaattttcagctcagctgttaaaaggaaaaggaaactttgaaactagactttactacctttttagtttcatagtatttctgaatatgattacaagattatgcaggtaaaatatagagtgaaactttacctgtgaattgaattataatttgtgtttttgttttgtttttaaggaagaataagttctgtatcaaacaagaatttattagataattttttggtcaataaaatacagtattcatttggattttcatctccagactagtattgttctagtcttggaatctgtattttctaatctgttagaaaatagagattgaaaattgatggaataatgtgaaaaagcaggtaattaattctccttgaacaaagcaaaactgaacagtcatatcacattgctattctccaaagcataatctcaaatggtttcatatcatggttgtgtattacttgcaatgggtgtgttaggatatgacagctttttaaaaaaatgagctgctggttatacaaagcaaatggcatatgaccaagaagctgtgatatgctagtgtttctttttatcatagtgtattactaggccaaataatgacaccttgaatatttttacatttattgcagaaaccttaaactttggaatttccataaggtttttatgtaatattctatttctagctttttagttttatcttgctgtactgtaagtttgaggatatttttcacctgcactcttaggaataagttcataattctgtttatggggctttcctcccataacactgcatttgtatattttctgtataaaatatgtgttgtgtattaacctttatcccatacagagagtggtacatgaatgactagttttctaagatgtcctttttattgtgaataaaatataaaagttaaaggccctctgctaagtcacataaagtacagcatataagttcatataggtacaaataaatgagtttgcagtgaattgggccttcaaattacctcaagtgacagatagtaagaaaagcttcttgagcaggtggaggtcactgaatcccctactatgcacttaccaagattttacttactttaatttactggaaattgattttttaaaaaatgactacactgtaacaagggaagggatctgggtttttttgttgttttattcttgttttttttaagtagttcaaattctgaaactgtgatttaaaaattttttacagtcaagcattctgattttgaacataactcccttccctttctgtgtaacaaaggtctctctgttatctcttaaattttgttacatctccctcagcctctttctttgtccgtctcccttctgtcattgtctatggatgtttacctctctgttctcctaaaagtttgaagattaggtcaactcttatttctagttcattggtaatttaatcttaatttttttttcgtgatttttgttggttgtataatctgctgacgtatttttatactcaagtgtagttttctattaaaaagaaaagtggttggattaaaaatagtaagctatgtaaccctcatgttactttcactttcaaatattgggtacctaaaacattacttcagagattatgtaatcctattatagtatgtttgctttcctttattgttggattttacattctgatttggctttcctccaaaaaatgtatatcatgaaagactagacagttatttgcaagtgtttagaaaggtgttaaaaatgtaaagcaaagagtcttaactttctcctaattgggagaaaaatgctttaacattactataataatattccaggtttggagggggtctccaggccccatatttgctgttaatagttggaccttttagaccatgtgttatttgcaatcccagaatgattgcttctgctattagttaaaaagatactattcttttctttctgtacaagtgcaatactccccttgaagtcttaaaaactatggtgatttttttttcttttctgacctattcttcctttagctaatgacaaaaagaaactcataaaagtcatagtatgttaaaggacacaacaagcaaagagaaaaacactccacaatcaaaagattacagaatgtggaaaccactagtctgatctcatggtatctttatttaagctaaatttccatggaaattagtaatcttttgcttgaaaaatgtgtcctaaagttgaactttttacagattgaatcttcttagaccctcgcccaatgctctaaattaagaacctaatacttaatatttttattttacttctccccttttagaaataaacttttaaataaaagcaaagcacttagctgagttttaaacacttacatatcacctattggagaaattttttttaaaaatatttggagcagtcctgttttcatacaaatttaagtaagaggtatttttcttatacatatttatatgtagtgtgctaattttctttttttatacctgtgtccctgtagtaaaactgctgtaatataaatacatgttttgttaaaagataacatttctttggcatttcttttaaaggcagttactgcatttctgcatttgtacagtatgtgtcttggccattttagatattctttctttaacaataccaaaggtaattagactattttaaagactaattgcttgacagtttctagggtattttgtgttttagaagcaaaaaaagaaaaaaaaataggtcaaaccagtaaacctcattttttttcaaactaataatttggggaaataaaaactattgtttaaaaaagaaatatatatatatatatataaatatatatgtaaagttaaaattccataccttgtatgtcaggtttgctaagtgtaatgtagtttttttaaggctcaaataccatacctcagaaaatgaggtttactatggaaatactgaaacagtctttgcagctgtgtgacaagtcactctactacatactgatttggagacctccgctaaatagttttatcactgcagactaaaatgtgggacttgtatcttctttgtttttaatgcacacacatacatgttctgtgcatgtatgtggttactgtgtatatgtgtatgagtgttgtatatgcatgtgtgagtgtgtgtctgtatgtgtgtacaactaaagaagctgcagaaactttgtaatactttgtgaaaaggattatattataaaggtttgtactgtctgagtgcacagctactggaataaatttagggaatctcaggaacaagcatataatttgtccaagatttatttcttctcagaagtgtaagtgcagtttttaattctgtatattatttaatattttaccaataaaataaacttctgacataaaaagtttgctataaaaaaaaaaaaaaaaaaaaaa

SEQ ID NO: 1422 - DNA, 2437 bp, Homo sapiens
gcaggagcacgtggagaggccgagtagccacagcggcagctccagcccggcccggcagcgacatggaagatatacaaacaaatgcggaactgaaaagcactcaggagcagtctgtgcccgcagaaagtgcagcggttttgaatgactacagtttaaccaaatctcatgaaatggaaaatgtggacagtggagaaggcccagccaatgaagatgaagacataggagatgattcaatgaaagtgaaagatgaatacagtgaaagagatgagaatgttttaaagtcagaacccatgggaaatgcagaagagcctgaaatcccttacagctattcaagagaatataatgaatatgaaaacattaagttggagagacatgttgtctcattcgatagtagcaggccaaccagtggaaagatgaactgcgatgtgtgtggattatcctgcatcagcttcaatgtcttaatggttcataagcgaagccatactggtgaacgcccattccagtgtaatcagtgtggggcatcttttactcagaaaggtaacctcctccgccacattaaactgcacacaggggaaaaaccttttaagtgtcacctctgcaactatgcatgccaaagaagagatgcgctcacggggcatcttaggacacattctgtggagaaaccctacaaatgtgagttttgtggaaggagttacaagcagagaagttcccttgaggagcacaaggagcgctgccgtacatttcttcagagcactgacccaggggacactgcaagtgcggaggcaagacacatcaaagcagagatgggaagtgaaagagctctcgtactggacagattagcaagcaatgtggcaaaacgaaaaagctcaatgcctcagaaattcattggtgagaagcgccactgctttgatgtcaactataattcaagttacatgtatgagaaagagagtgagctcatacagacccgcatgatggaccaagccatcaataacgccatcagctatcttggcgccgaagccctgcgccccttggtccagacaccgcctgctcccacctcggagatggttccagttatcagcagcatgtatcccatagccctcacccgggctgagatgtcaaacggtgcccctcaagagctggaaaagaaaagcatccaccttccagagaagagcgtgccttctgagagaggcctctctcccaacaatagtggccacgactccacggacactgacagcaaccatgaagaacgccagaatcacatctatcagcaaaatcacatggtcctgtctcgggcccgcaatgggatgccacttctgaaggaggttccccgctcttacgaactcctcaagcccccgcccatctgcccaagagactccgtcaaagtgatcaacaaggaaggggaggtgatggatgtgtatcggtgtgaccactgccgcgtcctcttcctggactatgtgatgttcacgattcacatgggctgccacggcttccgtgaccctttcgagtgtaacatgtgtggatatcgaagccatgatcggtatgagttctcgtctcacatagccagaggagaacacagagccctgctgaagtgaatatctggtctcagggattgctcctatgtattcagcatcgtttctaaaaaccaatgacctcgcctaacagattgctctcaaaacatactcagttccaaacttcttttcataccatttttagctgtgttcacaggggtagccagggaaacactgtcttccttcagaaattattcgcaggtctagcatattattacttttgtgaaacctttgttttcccatcagggacttgaattttatggaatttaaaagccaaaaaggtatttggtcattatcttctacagcagtggaatgagtggtcccggagatgtgctatatgaaacattctttctgagatatatcaaccacacgtggaaaagcctttcagtcatacatgcaaatccacaaagaggaagagctgaccagctgaccttgctgggaagcctcacccttctgcccttcacaggctgaagggttaagatctaatctccctaatctaaatgacagtctaagagtaagtaaaagaacagccataaaataagtatctgttacgagtaactgaagaccccattctccaagcatcagatccatttcctatcacaacatttttaaaaaatgtcatctgatggcacttctgcttctgtcctttaccttcccatctccagtgaaaagctgagctgctttgggctaaaccagttgtctatagaagaaaatctatgccagaagaactcatggttttaaatatagaccatcatcgaaactccagaaatttatccactgtggatgatgacatcgctttcctttggtcaaggttggcagagcaagggtataaagggggaaattgtttggcagcaccaacagaaaacaaa

SEQ ID NO: 1423 - DNA, 5506 bp, Homo sapiens
gaagctgtccgtgtcctgggccccatgacctctggggccttggcttccccagctggcagaggattgggccttccctagggccccccctttctccctcccacccgcaggcccatccatctctctctctctctcttgcacacactcttgcctctctcaggcatttgttgtgcagttcctctttgtctgctgggcacgaggggcaacagcatctgcctttccctccctgtgcacacacccaccacccacccccttcactgtcttggaaaagggatgctgtagcctagcatctcccccactatatacacatatacattctctccagccccctccccaagcacatccaagcgtgctctcccctctccttctctccctctctctctctctctctctcacacacacacacacacacacactcaacacacatacaccctgggctgagctgctcttgctggctgcagccgtgggcctctgctcaccgtgccgctgctgctgcctgcgaaatgacggcggttcccctcacttccaggaatccacgcttcctggaaggtgagtggctgggctcacccctgcctgccactgagacgcagacatgcatacaccacccgcactccctcgccgtttccaaggcggcggccgcgttcgcaccccagggtctcaccggcaagggaaggataatctggagagggatccctcaggagggtgtgttccggatttcttgcctcaggcccaagactccaaccattttataatggaatctttattttgtgaaagtagcggggactcatctctggagaaggagttcctcggggccccagtggggccctcggtgagcacccccaacagccagcactcttctcctagccgctcactcagtgccaactccatcaaggtggagatgtacagcgatgaggagtcaagcagactgctggggccagatgagcggctcctggaaaaggacgacagcgtgattgtggaagattcattgtctgagcccctgggctactgtgatgggagtgggccagagcctcactcccctgggggcatccggctgcccaatggcaagctcaagtgtgacgtctgcggcatggtctgtattggacccaacgtgctcatggtgcacaagcgcagtcacactggtgaaaggcccttccattgcaaccagtgtggtgcctccttcacccagaaggggaacctgctgcgccacatcaagctgcactctggggagaagccctttaaatgtcccttctgcaactatgcctgccgccggcgtgatgcactcactggtcacctccgcacacactcagtctcctctcccacagtgggcaagccctacaagtgtaactactgtggccggagctacaaacagcagagtaccctggaggagcacaaggagcggtgccataactacctacagagtctcagcactgaagcccaagctttggctggccaaccaggtgacgaaatacgtgacctggagatggtgccagactccatgctgcactcatcctctgagcggccaactttcatcgatcgtctggccaatagcctcaccaaacgcaagcgttccacaccccagaagtttgtaggcgaaaagcagatgcgcttcagcctctcagacctcccctatgatgtgaactcgggtggctatgaaaaggatgtggagttggtggcacaccacagcctagagcctggctttggaagttccctggcctttgtgggtgcagagcatctgcgtcccctccgccttccacccaccaattgcatctcagaactcacgcctgtcatcagctctgtctacacccagatgcagcccctccctggtcgactggagcttccaggatcccgagaagcaggtgagggacctgaggacctggctgatggaggtcccctcctctaccggccccgaggccccctgactgaccctggggcatcccccagcaatggctgccaggactccacagacacagaaagcaaccacgaagatcgggttgcgggggtggtatccctccctcagggtcccccaccccagccacctcccaccattgtggtgggccggcacagtcctgcctacgccaaagaggaccccaagccacaggaggggttattgcggggcaccccaggcccctccaaggaagtgcttcgggtggtgggcgagagtggtgagcctgtgaaggccttcaagtgtgagcactgccgtatcctcttcctggaccacgtcatgttcactatccacatgggctgccatggcttcagagacccttttgagtgcaacatctgtggttatcacagccaggaccggtacgaattctcttcccacattgtccggggggagcataaggtgggctagcaacctctccctctctcctcagtccaccactccactgccctgactacaggcattgatccctgtccccaccatttcccaaggagttttgctttgtagccctcactactggccacctgacctcacacctgaccctgacccctcctcacctattctcttcctctatcctgaccgatgtaagcattgtgatgaaacagatcttttgcttatgtttttcctttttatcttctctcatcccagcatactgagttatttattaattagttgatttatttttgcctttttaaattttaacttatatcagtcacttgccactcccccaccctcctgtccacaactcctttccactttaggccaatttttctctcttagatcttccagcagccccaggggtaggaagctcctcttagtactaagagacttcaagcttcttgctttaagtcctcaccctttacattatctaattcttcagttttgatgctgatacctgcccccggccctaccttagctctgtggcattatatctcctctctgggactcttcaacctggtactccatacctcttgtgccctctcactttaggcagcttgcactattcttgaatgaatgaagaattatttcctcatttggaagtaggagggactgaagaaattctccccaggcactgtgggactgagagtcctattcccctagtaataggtcatattcccctagtaatatgagttctcaaagcctacattcaggatctccctctaggatgtgatagatctggtccctctccttgaactacccctccacacgctctagtcccttcaacctaccggtctattaagtggtggcttttctctccttggagtgccccaattttatattctcaggggccaaggctaggtctgcaaccctctgtctctgacagattgggagccacaggtgcctaattgggaaccagggcatgggaaaggagtgggtcaaaattcttctctttctcctccacctctcaaacttcttcactatagtgaccttcctaggctctcaggggctccttcagtccccatcctatgagaaactagtgggttgctgcctgatgacaaggggttgtttcagcccctcagtcatgctgccttctgctgctccctcccagcaggattcaccctctcattcccgggctcctgggccctgttcttaggatcagtggcagggagaaacgggtatctcttttctctcttctaattttcagtataaccaaaaattatcccagcatgagcacgggcacgtgcccttcaccccattccacccttgttccagcaagactgggatgggtacaactgaactggggtcttcctttactacccccttctacactcagctcccagacacagggtaggaggggggactgctggctactgcagagacccttggctatttgagtaacctaggattagtgagaaggggcagaaggagatacaactccactgcaagtggaggtttctttctacaagagttttctgcccaaggccacagccatcccactctctgcttccttgagattcaaaccaaaggctgtttttctatgtttaaagaaaaaaaaaagtaaaaaccaaacacaacacctcacaagttgtaactcttggtccttctctctctccttttctcttcccttccttccccttccatctttctttccacatgtcctttccttattggctcttttacctcctacttttctcactccctatcagggatattttggggggggatggtaaagggtgggctaaggaacagaccctgggattagggccttaagggctctgagaggagtctaccttgccttcttatgggaagggagaccctaaaaaactttctcctctttgtcctcctttttctcccccactctgaggtttccccaagagaaccagattggcagggagaagcattgtggggcaattgttcctccttgacaatgtagcaataaatagatgctgccaagggcagaaaatggggaggttagctcagagcagagtagtctctagagaaaggaagaatcctcaacggcaccctggggtgctagctcctttttagaatgtcagcagagctgagattaatatctgggcttttcctgaactattctggttattgagcccttcctgttagacctaccgcctcccacctcttctgtgtctgctgtgtatttggtgacacttcataaggactagtcccttctggggtatcagagccttagggtgcccccatccccttccccagtcaactgtggcacctgtaacctcccggaacatgaaggactatgctctgaggctatactctgtgcccatgagagcagagactggaagggcaagaccaggtgctaaggaggggagagggggcatcctgtctctctccagaccatcactgcactttaaccagggtcttaggtacaaaatcctacttttcagagccttccagctctggaacctcaaacatcctcatgctctctcccagctccttttgcataaaaaaaaaagtaaagaaaaagaaaaaaaaatacacacacactgaaacccacatggagaaaagaggtgtttccttttatattgctattcaaaatcaataccaccaacaaaatatttctaagtagacacttttccagacctttgtttttttgtgtcagtgtccaagctgcagataggattttgtaatacttctggcagcttctttccttgtgtacataatatatatatatacatatatatatatatttttaatcagaagttatgaagaacaaaaagaaaaaataaacacagaagcaagtgcaataccacctctcttctccctctctcctagggtttcctttgtagcctatgtttggtgtctcttttgacctttaccccttcacctcctcctctcttcttctgattcccctcccccccttttttaaagagtttttctcctttctcaaggggagttaaactagcttttgagacttattgcaaagcattttgtatatgtaatatattgtaagtaaatatttgtgtaacggagatatactactgtaagttttgtactgtactggctgaaagtctgttataaataaacatgagtaatttaacaccaaaaaaaaaaaaaaaaaaaaaaaaaaaaaaaaaaaaaaaaaaaaaaaaaaaaaaa

SEQ ID NO: 1424 - DNA, 5132 bp, Homo sapiens
agccattttgtcagtcgccagcggatcccgcgcgctggagaagtgcagttccccctggttaccaactcgcccgcttttccttcggactaagggagccgtcgaagagcgctcgccaaaggcgcagccgtttctccctacggtgccgccgctcctcctgcagccgcccgtaggtagcgggccgttttcctcacctgtccctgacaggcgccctcagggagccgcggtccgcgatgtcaagcgaggaaagctaccgggccatcctgcgttacctgacgaacgagcgcgagccgtatgcgccgggcaccgagggcaatgtcaagcgtaaaatccgaaaagctgccgcctgctacgtggtgcgcggcgggactctgtattaccagcggcggcagcggcaccgcaagaccttcgcggagctggaggtggtgctgcagccggagcgacgccgggacctcatcgaggcggcgcacctgggtcccggcggcactcaccacacccggcatcagacctggcactacttgtccaagacgtactggtggcgaggtatattgaagcaagtcaaagattacattaaacagtgtagcaaatgccaggagaaactagatcgatcccgtccaatatcagatgtttcagaaatgttggaagaattgggactagaccttgaatctggagaagaaagtaatgaatcggaagatgacctgagcaactttacttcatctccaactacagcatccaagcctgcaaaaaagaagccagtatccaaacatgaacttgtgtttgttgacaccaaaggagtggtaaaacgttcttctccaaaacattgtcaggctgtcttaaaacagctgaacgaacagagactttccaaccagttctgtgatgttactttgttaattgaaggagaagagtacaaagctcataaatctgttttgtcagcaaatagcgagtattttcgagatctttttattgagaaaggagctgtttccagtcatgaggctgtggtggatctttctggtttttgtaaggccagcttccttcctttactggaatttgcctatacttctgtactaagttttgatttctgtagcatggctgatgtagccatcttagctcgtcatcttttcatgtcagaagtcttagagatttgtgaaagtgtacataagctaatggaagagaagcagctaacagtatataagaagggcgaagtacaaacagttgcatccacccaggacttacgagtacagaatggaggtacagcacctcctgttgctagcagtgagggaaccacaacaagtttacctactgaacttggggattgtgaaattgtactactggtaaatggagaattgccagaagctgagcagaatggagaggtaggacgacagcctgagccccaggtttcttcagaggctgaatctgccctgtcatcagtaggatgtatagctgattcccatcctgaaatggagtctgttgatttaataacaaaaaacaaccagacagaactagaaacttcaaacaacagagaaaataacacagtttctaatatacaccctaaactttcaaaagagaatgtaattagtagctcgccagaggatagtggtatgggaaatgatatatcagctgaggatatttgtgccgaagacattccaaaacataggcagaaagttgaccaacctttaaaagatcaggaaaatctagttgcatcaacagcaaagacagactttggccctgatgatgatacttatagaagcaggcttcgacaacgttctgttaatgaaggggcatatattcgactacacaagggaatggagaaaaagctgcagaaacggaaagccgttcccaagtcagcagttcaacaggtggctcagaagttagttcaaagaggaaaaaagatgaaacagccaaaaagagatgctaaagagaacacagaagaagcatctcataaatgtggggaatgtggaatggtttttcagagacgatacgcccttataatgcacaaactgaaacatgaaagagctagagattacaaatgtccattgtgtaaaaaacagtttcagtacagtgcctctttgcgagcacatcttattcgtcataccagaaaagatgcaccctcttcatcctcgtccaattccacgtctaatgaagcatcgggaacatcatctgagaagggcagaaccaagcgggaatttatatgttccatatgtggaagaacattacctaaattatattctctccgaatacatatgttaaagcacacaggtgtaaagccacatgcatgccaggtctgtggaaagacttttatctataagcatggtctaaaattacatcagagtcttcatcaatcacagaagcagttccagtgtgaactgtgtgttaagtcatttgttaccaaacggagtcttcaagaacatatgagtattcacacaggagagtccaagtacctttgctcagtttgtggaaagtcttttcataggggctctggactcagcaagcacttcaagaaacaccaaccaaagcctgaggttcgaggctatcattgtactcaatgtgaaaaaagtttctttgaagctagagatcttcgccagcacatgaacaaacatcttggtgtgaagccattccagtgccaattttgtgataagtgctatagttggaagaaagattggtattcccatgtgaagtctcattctgtcactgagccttataggtgtaatatatgtggcaaagaattttatgaaaaagctttgttcagaaggcatgtaaagaaagctacccatgggaagaaaggaagagcaaagcaaaacctggaacgggtgtgtgaaaaatgtggaagaaaattcactcagctaagagagtataggagacacatgaacaaccatgaaggagttaagccatttgagtgcttaacatgtggagtagcttgggctgatgcccgatctctaaaacgccatgtcagaacacatactggtgaacggccctatgtctgtcctgtatgtagcgaagcctacatagatgctcgaacactccgtaaacatatgactaaattccacagagactatgtgccttgcaaaattatgctggaaaaagacacccttcagtttcataaccaaggaactcaagtggcacatgctgttagcatcttaacagcaggcatgcaggaacaagaaagcagtggtcctcaagaacttgagactgtggtagtgacaggagaaactatggaagctctggaagctgttgcagctactgaagagtatccatcggtatctacactttctgaccaaagtattatgcaagtggttaattatgtattagcacaacagcaaggacagaagctatctgaagttgcagaagctattcaaactgttaaagtagaggtagcacatatttcaggaggagaatgagtatgttaatgaagataaaaagaagtgacatctcttgtacactgaactcacagaacatttgtttacaattctgtgtgactgtctgcttggagtttacatatcaaagttctgggctgtttggtaacgtaacgtttccaaacattttgtctggccaatgggttctatagaaaagtccgtttagtgtagagaaattgaaaacagatctattaggttggtgcaattgcttttgcaccaacctaatatttgatggcagtggtttatcatgatataccttttatgaattaatgtttataaatgactgtactgaatttaaaaccgtacagtttcatttgcattttgacattactttattatacattttgcatttaaaaggctgcaccagttggcttttcttctgttttattctcaaaatatagagattctgtgatttatttgccctgtttatggattaaaaagaaaattctaatataaagcatttcaataggatgcataggtatattacgttttttaaatgctttagatctgtgattcttgacttactatttattttatccccttttaagtcagggatgctttattctattttaaagcacttatgagttacatgttgtaatcaagtttgcacaatatatttatctatatgaggaacccataaatgaatagctaatttttaaaatgccattaaaatgcatgaaatgcttattaaaaccttactatactatttcttcaaggcaagtaaattgaccatgagaaaagaacacagttattaaacactgttgacaggaaaattctccttgataacataggacaattaatggaaaaaaaaattctcattatttgcaaagaatgaacaagttaatgaacaaacaaactagatttggtatgttttcagcttttgtatcatgtttaattgtttaatttggttgaaaaactgcagttgagaaatcagatagcaatatagacattcacagcagctctgtggataccatgtaattgtcaggtaatttcagaatgttgaaaattattcagtgcagccctcatagtatcatacttgaagaaattgattacagttccactaaattgttgaagataaattatttttaaaggttatgaaaactaagttatattaattcatatgtttgatttttaaatcccacctcctcaagctatccaattttctgactttgaaaataaccatgagagatgccacatttctctctgggaaactaccactcaaagaataattgttaaaaattaagcttttaggtattagaagctgttataaagtataaaattaagatataagcagatcacatgtaaatcattcctaaagcacaagaaaagaatgtgccttgatgtacatatattactaagttgcctctcccagtttactttaaaaatggctttaaggataaagaataaatgtgatagctgtgcatgcattatatatttgcatttgcaaatttcccattgttttaacagctgtgtggctgactttcaattttaagacgtgaattgacatacagcccataactttataatggctgctcatttatcttatctttcagttagtggaaaaacatttcaacctgactaaaatttggaattgtgtcttttatgttccatcctctgttgttactagatttagtttaaaaattgtgtatgaccattaatgtatgtcataaacatgtaaataaaagatgttgaatcttgttgaaaagcatgaaaaaaaaaaaaaaa

SEQ ID NO: 1425 - DNA, 4633 bp, Homo sapiens
gccctccattgtctccacggcggcgaggagcgccggcgagcgcagcccgggaccgagcggggcggcgcggctggcggggccggcggcggctgaagcgagagcgcgacgcgacgcgaccgcggcttcccgagctgcgcctggccgcccagcgccgcggcccgcccgaggcctggaggggtccgggccgccgtccatggtcgcggcgtcctgaggcgggggacgcgcccggcgcccccggccctcctccgcctcctcccgcggggcgggcggcctcctccggcgcctccccgcgcccgcccgccgctcgccgccgcctccctccctccttccctgcggctcccccggctttcggagcccgggggcggcctgtggcgcgcggagcccgcgccggactgcgcctctttggaccttgaggggaaacatgcgtttgccttggatcgtttgaaattctgagtttgggatccccgcccgcccgcctgcctcttccgccccgcgggttttttccttttttccttttgctttttttccttttctccctccgggtctcctttttgactccctccccctttatgctcgcccagccctccccctgctgctgagaagtgggggagggtctcggcctccaggttcccgccccaccggggcccgggcgagcatggggggcaagcagagcacggcggcccgctcccggggccccttcccgggggtctccaccgatgacagcgccgtgccgccgccgggaggggcgccccatttcgggcactaccggacgggcggcggggccatggggctgcgcagccgctcggtcagctcggtggcaggcatgggcatggaccccagcacggccgggggggtgccctttggcctctacacccccgcctcccggggcaccggcgactccgagagggcgcccggcggcggagggtctgcgtccgactccacctatgcccatggcaatggttaccaggagacgggcggcggtcaccatagagacgggatgctgtacctgggctcccgagcctcgctggcggatgctctacctctgcacatcgcacccaggtggttcagctcgcatagtggtttcaagtgccccatttgctccaagtctgtggcttctgacgagatggaaatgcactttataatgtgtttgagcaaacctcgcctctcctacaacgatgatgtgctgactaaagacgcgggtgagtgtgtgatctgcctggaggagctgctgcagggggacacgatagccaggctgccctgcctgtgcatctatcacaaaagctgcatagactcgtggtttgaagtgaacagatcttgtccggaacaccctgcggactgacctgcgggcttgcttgctgactcctctcaaagggacagagcgcccctgctccagggaggaggctcaccggaccctggggcagagctgagcttgggacaccagcgggaacagggcaccccttctgcactgacttccagatcatggttctcccttcctccctgaggacaccaaattggatgagagcaagtttgagagaagaatgaatcaactgctatccttcccctcacccctcagcccaggagggaaagggcattttctttttcatctttgaaaggcattgtgggtctgtctttaaagtgtttacaaaaaaaaattatataaaaaaaaagtctagtgtcgactggtgttttccctcgtgatgtttacagcttgctgtttgctgcccagccataacccactcagtgacagacgaacacagctaaggcctcgctgccagccttctgacggcgggcgagcacacggtctcttcccctgccccaactggccctctccaccaccaacttctctactttgggtttgtttggttttttccctctatttttctggctggttttttgctcttttctccccttgagaccctaatatcttgacttcattgccaaaaaacaacccattgagaactttcttcctactgatcccatctcttttcccttctttcctcctggttccggtcagttcagaggatttaacaatcacaagtgtcctgcaaaaatgcctgaacattattcttaggccctcgtggattttttttttcagaaaacttaaacaaaaaaagacttactaagaaatatgtacagctacccctgttttcaggcactatgtttgagaacattttagccattgatgttcacacgtggcatcagcccatgcaagataggtttctgtatttatatattaaaatacaaaaaaaaacttataaaatgtttaaaaaaatgttcaaagcttgggagaaaagctttcttcattagtcaaggtgttttgatatggtattaaaatgtctaataaaagatggcactgcgtgattttattttaatgaagtgttatacaatcaagaaatgggggcaagggcctgccccccactccctcacctacctccttagcattccttcaggctgctactcggggctccaggtgtgtgaattggtcctcagatagtcaggcctgggtggagggagtggcaagtcaggcgtgcctcctacaagcttcctaacctcttaagcatcatggaaccagtcagccctctgtggagtcattgtgctggacctctgaaaagatctgcaggggccaagatgttgcagccaccggaggctgcaaggatgtgggttcttccaggtgtgggcccagcccccctccttccagcctttgctccccatcccacgttccactcgccctgcctgttgttcagtttgcgtctcagtgctgactcacgggcatgcttcattgaggcccaggaagaggccctggtttggggctgtgccagctcagagcccttgaaccagaaccaactgctcaggctcacaaaagttggcaaaatgcgggctgggcaggcagctcggggcagggagcagcagtgcaggcctggcctgtgtccccgtgcccagcgggctcccggagcagcattccagagcctcctgcagagccagcgaaggaaagctctagagggagacgactccaccgcctctctgctctgacccttctcaggcccgcctgatgtgctggaccatccccctgctgccacggcccctggctccgcagtcaccctccatcagatgcttccagaagcacctactctgtgcaagggcattcacaacaggccagtgggcaaacgtgagccagggccagcggagaaacactaaagaagactcggtggttcagagcctgggtctcagcgcgggacccgtctggggtgaagaccttggggctgttgtgagtcggtggcaggaacgtgggctctagactgtgcattcaggctctcctacttggcagaatgatcttggggaaacgacttcatctgaacttcagatatttcacatgtgaagcggggacaaaaccatgcagctcagaggtccctgtgggggctgggggagctgccctgcaggtcttggcacatgcacagcaggctccccatagctttgtcaccacaaagggcactgttctattcacagcacctcctgcttctgcctggcaactgtgtctccctgtgctatatttaattccaccagcaaagctggcgaggcagggcccagccctgaaggagatctccttgcctgacccctggacctggaaatggaggcttcatgtgcccgccttggcggcttaagcctgctgctttggcagtgccatgggtgagccgagcagctgtgaggtgggtggggcagggctgtagcccacgccgggtgctattccaggctctaggggctggtgctcatccccacccccagcgacttccgtcctacctggcatgctgcagccctctgccggctgtggtgtcctctgaatttggacccaggttgcctgctcttgttgtgggggtgggattggggctgtctgtgtttcccaggtggagctcatgtttgtgatcctctatctggacagctctccagaatcctgtgttgcccctgttctgcctttctgggatgggagagaaggtgagggagccggcgagcaggttctaccctctctgctaagggcctagcacactttgatgaggttcctggacgtgagaccctcacaaagaccaaccattcctctaatagccatttaacggtactgcagttcatgggaaaatgtcctcattcttaggagatagatgctggattatataggtgaatgccttcaagaaatgtgtaatttaattccaaatagttccccccaaaatacacaaagcaaataaggccaaaatgttcattgttgaatctgcagtggctggtatttcagtgaacagtgtacttgttctttcaacttttctgtatgtttggaatttttcttaataaaagattgtgggaaatggtcatttgctgagcgcctcctagttgccaggcactggagggcgcatcaaagaagagtcctacccaggagggagagcgcagctgctgcaggattctcgcctggaagagtgggtggctggctggctggctggaaggggaggggcgagagggctgtctcggtgatgagcacacgcgtgctggggtggtttggggagagggctgagatttgtcaccagtgagcccttggcacggtctctgctccccaccagggcagcacgggacagaaacgtcacggaggagtagcctc

SEQ ID NO: 1426 - DNA, 1666 bp, Homo sapiens
cccctgggtggctgcggctggaccttcaccacctcttacaagctcaagaggcacctgcagtcgcacgataaactgcggcccttcggctgccctgcggagggctgtggcaagagcttcaccaccgtgtacaacctcaaggcgcacatgaagggccatgagcaggagaactcgttcaaatgtgaggtgtgcgaggagagcttccccacgcaggccaaactcggcgcccaccagcgcagccacttcgaacccgagaggccttaccagtgcgcgttttctggctgcaagaagacatttatcacagtgagtgctctgttttcccataaccgcgcccatttcagggaacaggaactgttttcctgctctttccctggctgcagcaagcaatatgacaaggcttgtaggctgaaaattcacctgcggagtcacaccggcgagagacctttcctttgtgactttgatggctgtggctggaacttcaccagcatgtccaaactcttaaggcacaaaaggaagcacgacgatgaccggaggttcatgtgccctgtggaaggctgtgggaaatctttcacgagggccgaacatctgaaaggccacagcattacccacctgggcacaaagcctttcgtgtgtcctgtggcaggctgctgtgccaggttctctgctcgcagtagcctctacattcactccaagaaacacctgcaggatgtggacacttggaaaagccgttgcccgatctcctcttgtaataaactcttcacatccaagcacagcatgaagacgcacatggttaaaaggcataaggtgggccaggatctcttagctcagctagaagcagcaaattctcttacacccagcagtgaacttaccagccagagacagaatgatctcagtgatgcagagatagtgtctctcttctctgatgtacctgacagtacttctgctgcattgctggacacagcattggtgaactctggaatcttgactattgatgtggcttctgtgagctcgactctggcagggcacctccctgctaataataataattccgtagggcaggctgtggaccctccgtccttgatggccaccagcgaccctcctcaaagtctggatacctctctcttttttggaacggcggccactggttttcagcagagctccttaaatatggatgaggtctcaagtgtaagtgtggggccattgggatctctggactctttggccatgaaaaactccagtccagagcctcaggctttgacacccagcagtaagctaacagtggacacagatactctgactccttcgagcaccctttgtgaaaacagtgtctcagaactactgacaccagccaaaagcggagtggagcgtacatcctaactctgacttctttggacaggagggagaaacccagtttggattccccaatgcagcaggaaaccatggttctcagaaagaaagaaatcttatcactgtgactggcagctcatttttggtatgaagcaactctattcattccttgccatgtggctaacttttattacagtcaattttgaggatattctggactaaatatttaagtgcagtcatttctttttggtttgcaaaaagagcacagccctggactatgagtttggagatctaaattctgatcttgagtctggaactgaca

SEQ ID NO: 1427 - DNA, 1209 bp, Homo sapiens
cccctgggtggctgcggctggaccttcaccacctcttacaagctcaagaggcacctgcagtcgcacgacaaactgcggccctttggctgcccggcagagggctgtggcaagagcttcaccacagtgtacaacctcaaggcgcacatgaagggccatgagcaggagaactcattcaaatgcgaggtgtgcgaggagagcttccccacgcaggccaaactcagcgcccaccagcgcagccacttcgaacctgagaggccttaccagtgcgcgttttctggctgcaagaagacatttatcacagtgagtgctctgttttcccataaccgcgcccatttcagggaacaggaactgttttcctgctcttttcctggctgcagcaaacaatatgacaaggcttgtaggctgaaaattcacctgcggagtcacaccggcgagagacctttcctttgtgactttgatggctgtggctggaacttcactagcatgtccaaactcttaaggcacaaaagaaagcacgacgatgaccggaggttcatgtgccctgtggaaggctgtgggaaatctttcacgagggcggaacatctgaaaggccacagcataacccacctgggcacaaagcctttcgtgtgtcctgtggcaggctgctgtgccaggttctctgctcgcagtagcctctacattcactccaagaaacacctgcaggatgtggacacttggaaaagccgttgcccgatctcctcttgtaataaactcttcacatccaagcacagcatgaagacgcacatggttaaaaggcataaggtgggccaggatctcttagctcagctagaagcagcaaattctctcacacccagcagtgaacttaccagccagagacagaatgatctcagtgatgcagagatagtgtctctcttctctgatgtacctgacagtacttctgctgcattgctggacacagcattggtgaactctggaatcttgactattgatgtggcttctgtgagctcgactctggcagggcacctccctgctaataataataattccgtagggcaggctgtggaccctccgtccttgatggccaccagcgaccctcctcaaagtctggatacctctctcttttttggaacggcggccactggttttcagcagagctccttaaatatggatgaggtctcaagtgtaagtgtggggccattgggatctctg

SEQ ID NO: 1428 - DNA, 2325 bp, Homo sapiens
cccgccccctctcttctccctccctcctccttccgtgtgtccctccccgcccggctggaggctgctccggaccgggacgcagagtctgcggacccggcgccgaggcggccacccgagacgcggcgcgcacgctccggcctgcgcagcccggcccggccatggcggccccccgcccgtctcccgcgatctccgtttcggtctcggctccggctttttacgccccgcagaagaagttcggccctgtggtggccccaaagcccaaagtgaatcccttccggcccggggacagcgagcctcccccggcacccggggcccagcgcgcacagatgggccgggtgggcgagattcccccgccgcccccggaagactttcccctgcctccacctccccttgctggggatggcgacgatgcagagggtgctctgggaggtgccttcccgccgccccctcccccgatcgaggaatcatttccccctgcgcctctggaggaggagatcttcccttccccgccgcctcctccggaggaggagggagggcctgaggcccccataccgcccccaccacagcccagggagaaggtgagcagtattgatttggagatcgactctctgtcctcactgctggatgacatgaccaagaatgatcctttcaaagcccgggtgtcatctggatatgtgcccccaccagtggccactccattcagttccaagtccagtaccaagcctgcagccgggggcacagcacccctgcctccttggaagtccccttccagctcccagcctctgccccaggttccggctccggctcagagccagacacagttccatgttcagccccagccccagcccaagcctcaggtccaactccatgtccagtcccagacccagcctgtgtctttggctaacacccagccccgagggcccccagcctcatctccggctccagcccctaagttttctccagtgactcctaagtttactcctgtggcttccaagttcagtcctggagccccaggtggatctgggtcacaaccaaatcaaaaattggggcaccccgaagctctttctgctggcacaggctcccctcaacctcccagcttcacctatgcccagcagagggagaagccccgagtgcaggagaagcagcaccccgtgcccccaccggctcagaaccaaaaccaggtgcgctcccctggggccccagggcccctgactctgaaggaggtggaggagctggagcagctgacccagcagctaatgcaggacatggagcatcctcagaggcagaatgtggctgtcaacgaactctgcggccgatgccatcaacccctggcccgggcgcagccagccgtccgcgctctagggcagctgttccacatcgcctgcttcacctgccaccagtgtgcgcagcagctccagggccagcagttctacagtctggagggggcgccgtactgcgagggctgttacactgacaccctggagaagtgtaacacctgcggggagcccatcactgaccgcatgctgagggccacgggcaaggcctatcacccgcactgcttcacctgtgtggtctgcgcccgccccctggagggcacctccttcatcgtggaccaggccaaccggccccactgtgtccccgactaccacaagcagtacgccccgaggtgctccgtctgctctgagcccatcatgcctgagcctggccgagatgagactgtgcgagtggtcgccctggacaagaacttccacatgaagtgttacaagtgtgaggactgcgggaagcccctgtcgattgaggcagatgacaatggctgcttccccctggacggtcacgtgctctgtcggaagtgccacactgctagagcccagacctgagtgaggacaggccctcttcagaccgcagtccatgccccattgtggaccacccacactgagaccacctgcccccacctcagttattgttttgatgtctagcccctcccatttccaacccctccctagcatcccaggtgccctgacccaggacccaacatggtctagggatgcaggatccccgccctggggtctggtcctcgcccatcctgcagggattgcccaccgtcttccagacaccccacctgaggggggcaccaggtttagtgctgctgctttcactgctgcacccgcgccctcggccggccccccgagcagcctttgtactctgcttgcggagggctgggagaccctccaggacattcccaccctcccccatgctgccaagttgtagctatagctacaaataaaaaaaaaccttgttttccagaaaaaaaaaaaaaaaaaaaaa

SEQ ID NO: 1429 - DNA, 23 bp, Artificial Sequence
  Description of Artificial Sequence: Synthetic primer
gtgagcaagggcgaggagctgtt

SEQ ID NO: 1430 - DNA, 28 bp, Artificial Sequence
  Description of Artificial Sequence: Synthetic primer
ttacttgtacagctcgtccatgccgaga

SEQ ID NO: 1431 - DNA, 23 bp, Artificial Sequence
  Description of Artificial Sequence: Synthetic primer
gtgagcaagggcgaggagctgtt

SEQ ID NO: 1432 - DNA, 31 bp, Artificial Sequence
  Description of Artificial Sequence: Synthetic primer
ctacacattgatcctagcagaagcacaggct

SEQ ID NO: 1433 - DNA, 21 bp, Artificial Sequence
  Description of Artificial Sequence: Synthetic primer
gctgtcagcgacgcgctgctc

SEQ ID NO: 1434 - DNA, 32 bp, Artificial Sequence
  Description of Artificial Sequence: Synthetic primer
ttaaaaatgcctcttcatgtgtaaggcgaggt

SEQ ID NO: 1435 - DNA, 27 bp, Artificial Sequence
  Description of Artificial Sequence: Synthetic primer
cccctcaacgttagcttcaccaacagg

SEQ ID NO: 1436 - DNA, 28 bp, Artificial Sequence
  Description of Artificial Sequence: Synthetic primer
ttacgcacaagagttccgtagctgttca

SEQ ID NO: 1437 - DNA, 24 bp, Artificial Sequence
  Description of Artificial Sequence: Synthetic primer
gcgggacacctggcttcggatttc

SEQ ID NO: 1438 - DNA, 28 bp, Artificial Sequence
  Description of Artificial Sequence: Synthetic primer
tcagtttgaatgcatgggagagcccaga

SEQ ID NO: 1439 - DNA, 28 bp, Artificial Sequence
  Description of Artificial Sequence: Synthetic primer
tacaacatgatggagacggagctgaagc

SEQ ID NO: 1440 - DNA, 25 bp, Artificial Sequence
  Description of Artificial Sequence: Synthetic primer
tcacatgtgtgagaggggcagtgtg

SEQ ID NO: 1441 - DNA, 18 bp, Artificial Sequence
  Description of Artificial Sequence: Synthetic primer
ggctccgtgtccaaccag

SEQ ID NO: 1442 - DNA, 18 bp, Artificial Sequence
  Description of Artificial Sequence: Synthetic primer
tcaattctgtgcctccgg

SEQ ID NO: 1443 - DNA, 22 bp, Artificial Sequence
  Description of Artificial Sequence: Synthetic primer
gagcttctatcgccgccactcc

SEQ ID NO: 1444 - DNA, 26 bp, Artificial Sequence
  Description of Artificial Sequence: Synthetic primer
tcaaagcacctgataaatcgcattgg

SEQ ID NO: 1445 - DNA, 42 bp, Artificial Sequence
  Description of Artificial Sequence: Synthetic oligonucleotide
tcctcgcccttgctcaccatggtggctcttatatttcttctt

SEQ ID NO: 1446 - DNA, 38 bp, Artificial Sequence
  Description of Artificial Sequence: Synthetic oligonucleotide
cccgcagaaggcagcttacttgtacagctcgtccatgc

SEQ ID NO: 1447 - DNA, 42 bp, Artificial Sequence; identical to SEQ ID NO: 1445
  Description of Artificial Sequence: Synthetic oligonucleotide

SEQ ID NO: 1448 - DNA, 36 bp, Artificial Sequence
  Description of Artificial Sequence: Synthetic oligonucleotide
cccgcagaaggcagcctacacattgatcctagcaga

SEQ ID NO: 1449 - DNA, 41 bp, Artificial Sequence
  Description of Artificial Sequence: Synthetic oligonucleotide
gcgcgtcgctgacagccatggtggctcttatatttcttctt

SEQ ID NO: 1450 - DNA, 39 bp, Artificial Sequence
  Description of Artificial Sequence: Synthetic oligonucleotide
cccgcagaaggcagcttaaaaatgcctcttcatgtgtaa

SEQ ID NO: 1451 - DNA, 45 bp, Artificial Sequence
  Description of Artificial Sequence: Synthetic oligonucleotide
gtgaagctaacgttgaggggcatggtggctcttatatttcttctt

SEQ ID NO: 1452 - DNA, 36 bp, Artificial Sequence
  Description of Artificial Sequence: Synthetic oligonucleotide
cccgcagaaggcagcttacgcacaagagttccgtag

SEQ ID NO: 1453 - DNA, 41 bp, Artificial Sequence
  Description of Artificial Sequence: Synthetic oligonucleotide
aagccaggtgtcccgccatggtggctcttatatttcttctt

SEQ ID NO: 1454 - DNA, 35 bp, Artificial Sequence
  Description of Artificial Sequence: Synthetic oligonucleotide
cccgcagaaggcagctcagtttgaatgcatgggag

SEQ ID NO: 1455 - DNA, 46 bp, Artificial Sequence
  Description of Artificial Sequence: Synthetic oligonucleotide
ctccgtctccatcatgttgtacatggtggctcttatatttcttctt

SEQ ID NO: 1456 - DNA, 34 bp, Artificial Sequence
  Description of Artificial Sequence: Synthetic oligonucleotide
cccgcagaaggcagctcacatgtgtgagaggggc

SEQ ID NO: 1457 - DNA, 43 bp, Artificial Sequence
  Description of Artificial Sequence: Synthetic oligonucleotide
ctggttggacacggagcccatggtggctcttatatttcttctt

SEQ ID NO: 1458 - DNA, 33 bp, Artificial Sequence
  Description of Artificial Sequence: Synthetic oligonucleotide
cccgcagaaggcagctcaattctgtgcctccgg

SEQ ID NO: 1459 - DNA, 43 bp, Artificial Sequence
  Description of Artificial Sequence: Synthetic oligonucleotide
tggcggcgatagaagctccatggtggctcttatatttcttctt

SEQ ID NO: 1460 - DNA, 41 bp, Artificial Sequence
  Description of Artificial Sequence: Synthetic oligonucleotide
cccgcagaaggcagctcaaagcacctgataaatcgcattgg

SEQ ID NO: 1461 - DNA, 87 bp, Artificial Sequence
  Description of Artificial Sequence: Synthetic oligonucleotide
ttggaccctcgtacagaagctaatacgactcactatagggaaataagagagaaaagaagagtaagaagaaatataagagccaccatg

SEQ ID NO: 1462 - DNA, 119 bp, Artificial Sequence
  Description of Artificial Sequence: Synthetic polynucleotide
gctgccttctgcggggcttgccttctggccatgcccttcttctctcccttgcacctgtacctcttggtctttgaataaagcctgagtaggaagtgagggtctagaactagtgtcgacgc

SEQ ID NO: 1463 - DNA, 27 bp, Artificial Sequence
  Description of Artificial Sequence: Synthetic primer
ttggaccctcgtacagaagctaatacg

SEQ ID NO: 1464 - DNA, 26 bp, Artificial Sequence
  Description of Artificial Sequence: Synthetic primer
gcgtcgacactagttctagaccctca

SEQ ID NO: 1465 - DNA, 27 bp, Artificial Sequence
  Description of Artificial Sequence: Synthetic primer
ttggaccctcgtacagaagctaatacg

SEQ ID NO: 1466 - DNA, 149 bp, Artificial Sequence
  Description of Artificial Sequence: Synthetic primer
ttttttttttttttttttttttttttttttttttttttttttttttttttttttttttttttttttttttttttttttttttttttttttttttttttttttttttttttttttttttttcttcctactcaggctttattcaaagacca

SEQ ID NO: 1467 - DNA, 18 bp, Artificial Sequence
  Description of Artificial Sequence: Synthetic primer
gaaggctggggctcattt

SEQ ID NO: 1468 - DNA, 20 bp, Artificial Sequence
  Description of Artificial Sequence: Synthetic primer
caggaggcattgctgatgat

SEQ ID NO: 1469 - DNA, 20 bp, Artificial Sequence
  Description of Artificial Sequence: Synthetic primer
acccacagcctggataacag

SEQ ID NO: 1470 - DNA, 20 bp, Artificial Sequence
  Description of Artificial Sequence: Synthetic primer
actggttgccatcaaactcc

SEQ ID NO: 1471 - DNA, 20 bp, Artificial Sequence
  Description of Artificial Sequence: Synthetic primer
cattacctgaaggccaagga

SEQ ID NO: 1472 - DNA, 20 bp, Artificial Sequence
  Description of Artificial Sequence: Synthetic primer
cagcatctgctggttgaaga

SEQ ID NO: 1473 - DNA, 20 bp, Artificial Sequence
  Description of Artificial Sequence: Synthetic primer
aaaagcccacatttgaggtg

SEQ ID NO: 1474 - DNA, 20 bp, Artificial Sequence
  Description of Artificial Sequence: Synthetic primer
gaaattcctgaaaccgacca

SEQ ID NO: 1475 - DNA, 20 bp, Artificial Sequence
  Description of Artificial Sequence: Synthetic primer
cgatcccaggaggtatcaga

SEQ ID NO: 1476 - DNA, 20 bp, Artificial Sequence
  Description of Artificial Sequence: Synthetic primer
tccagtcctcttctgcctgt

SEQ ID NO: 1477 - DNA, 20 bp, Artificial Sequence
  Description of Artificial Sequence: Synthetic primer
tcgctggtatcactcgtctg

SEQ ID NO: 1478 - DNA, 20 bp, Artificial Sequence
  Description of Artificial Sequence: Synthetic primer
gattctgaagaccgccagag

SEQ ID NO: 1479 - DNA, 20 bp, Artificial Sequence
  Description of Artificial Sequence: Synthetic primer
gttgtccccatgctgttctt

SEQ ID NO: 1480 - DNA, 20 bp, Artificial Sequence
  Description of Artificial Sequence: Synthetic primer
gcaagtcttacatggcagca

SEQ ID NO: 1481 - RNA, 13 nt, Artificial Sequence
  Description of Artificial Sequence: Synthetic consensus sequence
gccgccrccaugg

SEQ ID NO: 1482 - protein, 4 aa, Homo sapiens
YRPW

SEQ ID NO: 1483 - DNA, 4533 bp, Homo sapiens
ccctgtgtctaggtcgtttgggaaacgccttggagagtcaagaataaatttgcaggtcaaacaatggatgactggaaaagtcggcttgtaatcaagagcatgcttccccatttcgccatggtgggaaatcgtcaggagcccagaaagctccaggaatcgggaactgttaagaggagacaagaagaagaccacttccagtttccagacatggctgatgggggctaccctaataaaattaagaggccttgccttgaagatgtcacccttgcaatgggcccaggtgctcatcctagtactgcttgtgcagaactgcaggtccctccattgacaataaatcctagccctgcggctatgggagtggctggccagtcattactgctggagaataaccctatgaatggcaacatcatgggctcaccatttgtagtaccacagactacagaagtgggactgaaagggcccactgttccttactatgagaaaatcaacagcgtgccggctgtagaccaggagcttcaagagctgctagaggagctcaccaaaattcaagacccttctccaaatgagctagatcttgagaagatactggggacgaagccagaagagccactggttttagatcatccccaggcaaccctaagcacaactcccaagccttcggttcagatgtcacacttggagagcctggcttccagcaaggagtttgcttctagttgcagccaagttactggcatgtcacttcagatcccatcctcctccacagggatcagctattcgattccttccaccagtaagcagatagtgtcaccgagttcttcaatggcacagtccaagagccaggtccaggccatgctccctgtcgctctgccccccttaccagtgcctcagtggcatcacgcccaccagctgaaggcgttggcagccagcaagcaggggtctgctacaaagcagcaagggcccacccccagttggtctggtctgcctcctccaggactctctccaccttaccgcccagtgccatcaccacacccaccaccgctgccactgccaccaccaccacccccattcagcccccagagcctcatggtgtcctgcatgtcgtccaataccttgtcgggtagcactctccgaggctctcccaatgccttactgtcaagcatgacgtccagcagcaatgctgccctggggcccgccatgccctatgctcctgagaagctccccagccctgctctcactcaacagccgcagttcggccctcagagctccattcttgccaacctcatgtcctctaccatcaaaacccctcaaggacacctgatgtctgctctgcctgccagcaaccctgggccgtccccaccctatcgcccagagaagctctctagcccaggcttgccacagcagtccttcaccccacagtgttccctgatccgaagcctcactcccaccagtaatcttctaagccagcaacagcagcagcagcagcagcagcagcaagcaaatgtgatctttaagcccataagcagcaactcatccaaaaccctgagcatgatcatgcagcaggggatggcaagctccagcccaggagccacggagccatttacttttggcaacaccaagcccttgtcccattttgtttctgagccgggtccccagaagatgccctccatgcctaccacctctaggcagccttccctgctccactacctgcagcagccgacaccaacgcaggcctcctcagccactgcctcctccacggccactgccaccttgcagctgcagcagcagcagcagcaacagcagcagcagcctgaccattcttcattccttctgcagcagatgatgcagcaaccccagcgttttcagcgatcagtggcctcagattccatgcctgctctgcccagacagggctgttgccatctgtttgcatggacttctgcagctagctcggtgaagccccagcatcaacacgggaactctttcactagcaggcaagatcctcagcctggagacgtgtcaccgtctaacattactcatgtagacaaagcctgcaagcttggggaagccaggcacccccaggtcagcctcgggcgacagcccccgtcctgccaggccctggggagtgagtccttcctgcccggcagctcctttgctcatgagctggcccgagtcacctcctcgtacagcacctcagaggcagcgccctggggcagctgggatccgaaggcctggaggcaggtgcccgctccactactgcctagctgcgacgccacagcaagaggaacagagatcaggtcttatggcaatgacccctgaacggcagaatgcatatatctcccaacagatgagtccatttgaagccgtccaagaacaagtcacctccaagtgtagccggatcaaggcaagccccccatctagcaagcacttgatgccacccagaactgggcttcttcagaacaatctgagtccaggaatgatcccactcaccaggcaccagagctgcgagggcatgggagtgatctcaccaactctggggaagcggcaaggaattttcacctccagcccccagtgtcccatcctctcacactcaggccagactcccctgggcagacttgactctgtctgccagcatatgcagagccccaaggccaccccaccagaagtgcccctgcctgggttctgtcccagctccctgggcacccagtccttgagtccccaccagctcagacggcctagtgtgccaagaatgcccactgcgttcaacaatgctgcatgggtcacagcggcagcagctgtgaccacagcagtttcggggaaaacacccctcagccaagtggataatagcgttcagcagcactcaccttctggccaggcctgccttcagaggccatctgattgggaggcacaagtgcccgctgcgatgggaacacaagtgcccctggccaacaaccccagcttcagcctgctgggcagccagagcctcaggcagagcccggtacagggcccggtgcctgtagcaaacaccaccaagttcctccagcagggtatggccagctttagtcccctgagccccatacagggcatcgagccaccaagctatgtggctgctgctgccaccgctgctgctgcttctgccgttgctgccagccagttcccaggtccgttcgacagaacggatattccccctgagctgccacctgccgactttttgcgccagccccaacccccactaaatgatctgatttcgtcacctgactgcaatgaggtagatttcattgaagctctcttgaaaggctcctgtgtgagcccagatgaagactgggtgtgcaacttgaggctgatcgacgacattttggaacagcatgctgctgctcaaaatgccacagcccagaattctgggcaagtcacccaggatgctggggcactttaaatctgagcaggatgcccatagaaacccccatggtgacatcactctaggaagtggtgtcgatccatacccgcagttgtctcccgttacaatttgagtggtgttgtcagcccatgcttatccctctctctacctgtgacaaaatggaaagctggtgatttttcaagctacgtgtacatatttgaaaattttgtaaatggttttcctaaacattaatgacagaagtatttatacttcattttgtgactttgtaaataaagcgacggcttttgtttcagtagagttgtgtttactatgcattgttttgtgtttattatacaatgttacaaatatgcagaccgtgttgtttgctccagtgataccttgttaagctaggtggctgagtcgcttatggttttaatgcaatgagcaatgtggatatgaccaagagttgttgtgcaagttgacaaatgccaaatagaaaaccacttggccatttatttctatgttcactaaaaatcctattgccttgtgtgattcttaatctcttttgcgaacctttcagtctccgctagctctttcctaatgagctttacagcagaagctgttttatcgttaagtgccccacagagacactttaccaggaggctgggagagttctccagatttgggagaggcgcagagacagtgtgtgagccgagccctgtctcagcaatccacctggaggagctagagtatcctcctccctttaccattcagaccgagagaaaaagcccagcttgtgtgcaccctcgtggggttaaggcgagctgttcctggtttaaagcctttcagtatttgttttgatgtaaggctctgtggtttgggggggaacatctgtaaacattattagttgatttggggtttgtctttgatggtttctatctgcaattatcgtcatgtatatttaagtgtctgttatagaaaacccacacccactgtcctgtaaacttttctcagtgtccagactttctgtaatcacattttaattgccacctcgtatttcacctctacatttgaaatctggcgtctgtttcaagccagtgtgttttttcttcgttctgtaataaacagccaggagaaaagtgcca

SEQ ID NO: 1484 - DNA, 4608 bp, Homo sapiens
ccctgtgtctaggtcgtttgggaaacgccttggagagtcaagaataaatttgcaggtcaaacaatggatgactggaaaagtcggcttgtaatcaagagcatgcttccccatttcgccatggtgggaaatcgtcaggagcccagaaagctccaggaatcgggaaagaagccctcgtggatggaggaagaagatttatcttttctctacaagagcagcccaggaagaaagcatcagggaactgttaagaggagacaagaagaagaccacttccagtttccagacatggctgatgggggctaccctaataaaattaagaggccttgccttgaagatgtcacccttgcaatgggcccaggtgctcatcctagtactgcttgtgcagaactgcaggtccctccattgacaataaatcctagccctgcggctatgggagtggctggccagtcattactgctggagaataaccctatgaatggcaacatcatgggctcaccatttgtagtaccacagactacagaagtgggactgaaagggcccactgttccttactatgagaaaatcaacagcgtgccggctgtagaccaggagcttcaagagctgctagaggagctcaccaaaattcaagacccttctccaaatgagctagatcttgagaagatactggggacgaagccagaagagccactggttttagatcatccccaggcaaccctaagcacaactcccaagccttcggttcagatgtcacacttggagagcctggcttccagcaaggagtttgcttctagttgcagccaagttactggcatgtcacttcagatcccatcctcctccacagggatcagctattcgattccttccaccagtaagcagatagtgtcaccgagttcttcaatggcacagtccaagagccaggtccaggccatgctccctgtcgctctgccccccttaccagtgcctcagtggcatcacgcccaccagctgaaggcgttggcagccagcaagcaggggtctgctacaaagcagcaagggcccacccccagttggtctggtctgcctcctccaggactctctccaccttaccgcccagtgccatcaccacacccaccaccgctgccactgccaccaccaccacccccattcagcccccagagcctcatggtgtcctgcatgtcgtccaataccttgtcgggtagcactctccgaggctctcccaatgccttactgtcaagcatgacgtccagcagcaatgctgccctggggcccgccatgccctatgctcctgagaagctccccagccctgctctcactcaacagccgcagttcggccctcagagctccattcttgccaacctcatgtcctctaccatcaaaacccctcaaggacacctgatgtctgctctgcctgccagcaaccctgggccgtccccaccctatcgcccagagaagctctctagcccaggcttgccacagcagtccttcaccccacagtgttccctgatccgaagcctcactcccaccagtaatcttctaagccagcaacagcagcagcagcagcagcagcagcaagcaaatgtgatctttaagcccataagcagcaactcatccaaaaccctgagcatgatcatgcagcaggggatggcaagctccagcccaggagccacggagccatttacttttggcaacaccaagcccttgtcccattttgtttctgagccgggtccccagaagatgccctccatgcctaccacctctaggcagccttccctgctccactacctgcagcagccgacaccaacgcaggcctcctcagccactgcctcctccacggccactgccaccttgcagctgcagcagcagcagcagcaacagcagcagcagcctgaccattcttcattccttctgcagcagatgatgcagcaaccccagcgttttcagcgatcagtggcctcagattccatgcctgctctgcccagacagggctgttgccatctgtttgcatggacttctgcagctagctcggtgaagccccagcatcaacacgggaactctttcactagcaggcaagatcctcagcctggagacgtgtcaccgtctaacattactcatgtagacaaagcctgcaagcttggggaagccaggcacccccaggtcagcctcgggcgacagcccccgtcctgccaggccctggggagtgagtccttcctgcccggcagctcctttgctcatgagctggcccgagtcacctcctcgtacagcacctcagaggcagcgccctggggcagctgggatccgaaggcctggaggcaggtgcccgctccactactgcctagctgcgacgccacagcaagaggaacagagatcaggtcttatggcaatgacccctgaacggcagaatgcatatatctcccaacagatgagtccatttgaagccgtccaagaacaagtcacctccaagtgtagccggatcaaggcaagccccccatctagcaagcacttgatgccacccagaactgggcttcttcagaacaatctgagtccaggaatgatcccactcaccaggcaccagagctgcgagggcatgggagtgatctcaccaactctggggaagcggcaaggaattttcacctccagcccccagtgtcccatcctctcacactcaggccagactcccctgggcagacttgactctgtctgccagcatatgcagagccccaaggccaccccaccagaagtgcccctgcctgggttctgtcccagctccctgggcacccagtccttgagtccccaccagctcagacggcctagtgtgccaagaatgcccactgcgttcaacaatgctgcatgggtcacagcggcagcagctgtgaccacagcagtttcggggaaaacacccctcagccaagtggataatagcgttcagcagcactcaccttctggccaggcctgccttcagaggccatctgattgggaggcacaagtgcccgctgcgatgggaacacaagtgcccctggccaacaaccccagcttcagcctgctgggcagccagagcctcaggcagagcccggtacagggcccggtgcctgtagcaaacaccaccaagttcctccagcagggtatggccagctttagtcccctgagccccatacagggcatcgagccaccaagctatgtggctgctgctgccaccgctgctgctgcttctgccgttgctgccagccagttcccaggtccgttcgacagaacggatattccccctgagctgccacctgccgactttttgcgccagccccaacccccactaaatgatctgatttcgtcacctgactgcaatgaggtagatttcattgaagctctcttgaaaggctcctgtgtgagcccagatgaagactgggtgtgcaacttgaggctgatcgacgacattttggaacagcatgctgctgctcaaaatgccacagcccagaattctgggcaagtcacccaggatgctggggcactttaaatctgagcaggatgcccatagaaacccccatggtgacatcactctaggaagtggtgtcgatccatacccgcagttgtctcccgttacaatttgagtggtgttgtcagcccatgcttatccctctctctacctgtgacaaaatggaaagctggtgatttttcaagctacgtgtacatatttgaaaattttgtaaatggttttcctaaacattaatgacagaagtatttatacttcattttgtgactttgtaaataaagcgacggcttttgtttcagtagagttgtgtttactatgcattgttttgtgtttattatacaatgttacaaatatgcagaccgtgttgtttgctccagtgataccttgttaagctaggtggctgagtcgcttatggttttaatgcaatgagcaatgtggatatgaccaagagttgttgtgcaagttgacaaatgccaaatagaaaaccacttggccatttatttctatgttcactaaaaatcctattgccttgtgtgattcttaatctcttttgcgaacctttcagtctccgctagctctttcctaatgagctttacagcagaagctgttttatcgttaagtgccccacagagacactttaccaggaggctgggagagttctccagatttgggagaggcgcagagacagtgtgtgagccgagccctgtctcagcaatccacctggaggagctagagtatcctcctccctttaccattcagaccgagagaaaaagcccagcttgtgtgcaccctcgtggggttaaggcgagctgttcctggtttaaagcctttcagtatttgttttgatgtaaggctctgtggtttgggggggaacatctgtaaacattattagttgatttggggtttgtctttgatggtttctatctgcaattatcgtcatgtatatttaagtgtctgttatagaaaacccacacccactgtcctgtaaacttttctcagtgtccagactttctgtaatcacattttaattgccacctcgtatttcacctctacatttgaaatctggcgtctgtttcaagccagtgtgttttttcttcgttctgtaataaacagccaggagaaaagtgcca

SEQ ID NO: 1485 - DNA, 2772 bp, Homo sapiens
ggcctgctgggttagtgctggcagccccctgaggccaaggacagcagcatgacagtcaccaggactcaccacttcaaggaggggtccctcagagcacctgccatacccctgcacagtgctgcggctgagttggcttcaaaccatccaagaggcccagaagcaaacctggaggtgagacccaaagaaagctggaaccatgctgactttgtacactgtgaggacacagagtctgttcctggaaagcccagtgtcaacgcagatgaggaagtcggaggtccccaaatctgccgtgtatgtggggacaaggccactggctatcacttcaatgtcatgacatgtgaaggatgcaagggctttttcaggagggccatgaaacgcaacgcccggctgaggtgccccttccggaagggcgcctgcgagatcacccggaagacccggcgacagtgccaggcctgccgcctgcgcaagtgcctggagagcggcatgaagaaggagatgatcatgtccgacgaggccgtggaggagaggcgggccttgatcaagcggaagaaaagtgaacggacagggactcagccactgggagtgcaggggctgacagaggagcagcggatgatgatcagggagctgatggacgctcagatgaaaacctttgacactaccttctcccatttcaagaatttccggctgccaggggtgcttagcagtggctgcgagttgccagagtctctgcaggccccatcgagggaagaagctgccaagtggagccaggtccggaaagatctgtgctctttgaaggtctctctgcagctgcggggggaggatggcagtgtctggaactacaaacccccagccgacagtggcgggaaagagatcttctccctgctgccccacatggctgacatgtcaacctacatgttcaaaggcatcatcagctttgccaaagtcatctcctacttcagggacttgcccatcgaggaccagatctccctgctgaagggggccgctttcgagctgtgtcaactgagattcaacacagtgttcaacgcggagactggaacctgggagtgtggccggctgtcctactgcttggaagacactgcaggtggcttccagcaacttctactggagcccatgctgaaattccactacatgctgaagaagctgcagctgcatgaggaggagtatgtgctgatgcaggccatctccctcttctccccagaccgcccaggtgtgctgcagcaccgcgtggtggaccagctgcaggagcaattcgccattactctgaagtcctacattgaatgcaatcggccccagcctgctcataggttcttgttcctgaagatcatggctatgctcaccgagctccgcagcatcaatgctcagcacacccagcggctgctgcgcatccaggacatacacccctttgctacgcccctcatgcaggagttgttcggcatcacaggtagctgagcggctgcccttgggtgacacctccgagaggcagccagacccagagccctctgagccgccactcccgggccaagacagatggacactgccaagagccgacaatgccctgctggcctgtctccctagggaattcctgctatgacagctggctagcattcctcaggaaggacatgggtgccccccacccccagttcagtctgtagggagtgaagccacagactcttacgtggagagtgcactgacctgtaggtcaggaccatcagagaggcaaggttgccctttccttttaaaaggccctgtggtctggggagaaatccctcagatcccactaaagtgtcaaggtgtggaagggaccaagcgaccaaggatgggccatctggggtctatgcccacatacccacgtttgttcgcttcctgagtcttttcattgctacctctaatagtcctgtctcccacttcccactcgttcccctcctcttccgagctgctttgtgggctccaggcctgtactcatcggcaggcgcatgagtatctgtgggagtcctctagagagatgagaagccaggaggcctgcaccaaatgtcagaagcttggcatgacctcattccggccacatcattctgtgtctctgcatccatttgaacacattattaagcaccgataataggtagcctgctgtggggtatacagcattgactcagatatagatcctgagctcacagagtttatagttaaaaaaacaaacagaaacacaaacaatttggatcaaaaggagaaatgataagtgacaaaagcagcacaaggaatttccctgtgtggatgctgagctgtgatggcgggcactgggtacccaagtgaaggttcccgaggacatgagtctgtaggagcaagggcacaaactgcagctgtgagtgcgtgtgtgtgatttggtgtaggtaggtctgtttgccacttgatggggcctgggtttgttcctggggctggaatgctgggtatgctctgtgacaaggctacgctgacaatcagttaaacacaccggagaagaaccatttacatgcaccttatatttctgtgtacacatctattctcaaagctaaagggtatgaaagtgcctgccttgtttatagccacttgtgagtaaaaatttttttgcattttcacaaattatactttatataaggcattccacacctaagaactagttttgggaaatgtagccctgggtttaatgtcaaatcaaggcaaaaggaattaaataatgtacttttggctaaaaaaaaaaaaaaaaaaaaaaaaaaaaaa

SEQ ID NO: 1486 - DNA, 4335 bp, Homo sapiens
ttcttaaccctttccagctttcccaccctctttggctttagccatggccttctgatctgtgtttctcaggggacctgcaggccccagatatagccccatgctgtcctcctaccccagagcacactgttcaggctacttccactggtactgaaatccagtatttcacttactctttttctttccaatatcctcatgacattcaatatttcacttactctaggtcctccctgcctaaggcccaagtcaactttctgtccagtgggatttgtaatccaatacctcctagccctagcagaatcccatgtggataatcagaaatgtgactggaaaaaggacagagctctatggctgtgggtcccagtccccactgctggcagtaagtccccagcagtgagctgtgtaagcaccttacattctgcgcttggttgaaaacagcaaggcaagcatccacttgagaaatgtcaacccctaggaaatcccagcctcaagtctttctcatcccttgggaagtgcaaattggatagagaagaaaccaattaaaaacaaaacaaacaaatcatacttagatattctggcttttctcaccagggctggattaaagcatgtacttcaaaataataacaacttaagtcaataaataaatgtaaggaagtccaaatgttcacctgaagacaactgtggtcattttttggcaatcccaggttctcttttctacctgtttgctcaatcgtggtctccctctccctctcttgttggggcccatgcccctgctttactgttgccagaggcttgtacttgtttgccttttaggtaggagcagttacttccactcccctcacctgccataaagcatctttataaacaaagcaagtagaagaaacacatcctggtatccaccacattcggcttttgttgattctgttcacttgggagcacctgctgctagggaataagaaggttgaggctgaagagtgaggactcttcagctcccctctggcaggacccgggagaggaaagagccctcagctggtccatcctccccactcctggtcagccttctgttctgagatcaaagtggtggggtcacattctcgagaactgtgctcagccccctcatctcacaccctttccctctccctgtgtgcctgcccccctcttacataaccatgctggtgattggcaccgtcataaatcaatactttgctcactttcacatcaagtaacactatccagggaggtggtttcaacaaaggaggaagtataaggagatctaggttcaaattaatgttgcccctagtggtaaaggacagagaccctcagactgatgaaatgcactcagaattacttagacaaagcggatatttgccactctcttccccttttcctgtgtttttgtagtgaagagacctgaaagaaaaaagtagggagaacataatgagaacaaatacggtaatctcttcatttgctagttcaagtgctggacttgggacttaggaggggcaatggagccgcttagtgcctacatctgacttggactgaaatataggtgagagacaagattgtctcatatccggggaaatcataacctatgactaggacgggaagaggaagcactgcctttacttcagtgggaatctcggcctcagcctgcaagccaagtgttcacagtgagaaaagcaagagaataagctaatactcctgtcctgaacaaggcagcggctccttggtaaagctactccttgatcgatcctttgcaccggattgttcaaagtggaccccaggggagaagtcggagcaaagaacttaccaccaagcagtccaagaggcccagaagcaaacctggaggtgagacccaaagaaagctggaaccatgctgactttgtacactgtgaggacacagagtctgttcctggaaagcccagtgtcaacgcagatgaggaagtcggaggtccccaaatctgccgtgtatgtggggacaaggccactggctatcacttcaatgtcatgacatgtgaaggatgcaagggctttttcaggagggccatgaaacgcaacgcccggctgaggtgccccttccggaagggcgcctgcgagatcacccggaagacccggcgacagtgccaggcctgccgcctgcgcaagtgcctggagagcggcatgaagaaggagatgatcatgtccgacgaggccgtggaggagaggcgggccttgatcaagcggaagaaaagtgaacggacagggactcagccactgggagtgcaggggctgacagaggagcagcggatgatgatcagggagctgatggacgctcagatgaaaacctttgacactaccttctcccatttcaagaatttccgggtctctctgcagctgcggggggaggatggcagtgtctggaactacaaacccccagccgacagtggcgggaaagagatcttctccctgctgccccacatggctgacatgtcaacctacatgttcaaaggcatcatcagctttgccaaagtcatctcctacttcagggacttgcccatcgaggaccagatctccctgctgaagggggccgctttcgagctgtgtcaactgagattcaacacagtgttcaacgcggagactggaacctgggagtgtggccggctgtcctactgcttggaagacactgcaggtggcttccagcaacttctactggagcccatgctgaaattccactacatgctgaagaagctgcagctgcatgaggaggagtatgtgctgatgcaggccatctccctcttctccccagaccgcccaggtgtgctgcagcaccgcgtggtggaccagctgcaggagcaattcgccattactctgaagtcctacattgaatgcaatcggccccagcctgctcataggttcttgttcctgaagatcatggctatgctcaccgagctccgcagcatcaatgctcagcacacccagcggctgctgcgcatccaggacatacacccctttgctacgcccctcatgcaggagttgttcggcatcacaggtagctgagcggctgcccttgggtgacacctccgagaggcagccagacccagagccctctgagccgccactcccgggccaagacagatggacactgccaagagccgacaatgccctgctggcctgtctccctagggaattcctgctatgacagctggctagcattcctcaggaaggacatgggtgccccccacccccagttcagtctgtagggagtgaagccacagactcttacgtggagagtgcactgacctgtaggtcaggaccatcagagaggcaaggttgccctttccttttaaaaggccctgtggtctggggagaaatccctcagatcccactaaagtgtcaaggtgtggaagggaccaagcgaccaaggatgggccatctggggtctatgcccacatacccacgtttgttcgcttcctgagtcttttcattgctacctctaatagtcctgtctcccacttcccactcgttcccctcctcttccgagctgctttgtgggctccaggcctgtactcatcggcaggcgcatgagtatctgtgggagtcctctagagagatgagaagccaggaggcctgcaccaaatgtcagaagcttggcatgacctcattccggccacatcattctgtgtctctgcatccatttgaacacattattaagcaccgataataggtagcctgctgtggggtatacagcattgactcagatatagatcctgagctcacagagtttatagttaaaaaaacaaacagaaacacaaacaatttggatcaaaaggagaaatgataagtgacaaaagcagcacaaggaatttccctgtgtggatgctgagctgtgatggcgggcactgggtacccaagtgaaggttcccgaggacatgagtctgtaggagcaagggcacaaactgcagctgtgagtgcgtgtgtgtgatttggtgtaggtaggtctgtttgccacttgatggggcctgggtttgttcctggggctggaatgctgggtatgctctgtgacaaggctacgctgacaatcagttaaacacaccggagaagaaccatttacatgcaccttatatttctgtgtacacatctattctcaaagctaaagggtatgaaagtgcctgccttgtttatagccacttgtgagtaaaaatttttttgcattttcacaaattatactttatataaggcattccacacctaagaactagttttgggaaatgtagccctgggtttaatgtcaaatcaaggcaaaaggaattaaataatgtacttttggctaaaaaaaaaaaaaaaaaaaaaaaaaaaaaa

SEQ ID NO: 1487 - DNA, 3393 bp, Homo sapiens
cagtgctagcgggcgccgagcgggagccgcgcgggagcagcgcagctacggcggcggcagcggcggcgcggttgcgattccgagccgttgagacgcctctgcggcagctggtggcgcaggtggcttgcgtggacgcgggtagaggcgaccggccagcaaccgcagcgtcggcgcccgcggccccggcaggcgcgtcgggacgccccgaggcatcctcccccgcccgcgggcccggtagctgggcccgcgtccgccgcccgcatccccgcgccgccgcatctcctcgccgcctcccgggcttcggacccccggtctcgcccccgaaacatgactcgcgatttcaaacctggagacctcatcttcgccaagatgaaaggttatccccattggccagctcgagtagacgaagttcctgatggagctgtaaagccacccacaaacaaactacccattttcttttttggaactcatgagactgcttttttaggaccaaaggatatatttccttactcagaaaataaggaaaagtatggcaaaccaaataaaagaaaaggttttaatgaaggtttatgggagatagataacaatccaaaagtgaaattttcaagtcaacaggcagcaactaaacaatcaaatgcatcatctgatgttgaagttgaagaaaaggaaactagtgtttcaaaggaagataccgaccatgaagaaaaagccagcaatgaggatgtgactaaagcagttgacataactactccaaaagctgccagaagggggagaaagagaaaggcagaaaaacaagtagaaactgaggaggcaggagtagtgacaacagcaacagcatctgttaatctaaaagtgagtcctaaaagaggacgacctgcagctacagaagtcaagattccaaaaccaagaggcagacccaaaatggtaaaacagccctgtccttcagagagtgacatcattactgaagaggacaaaagtaagaaaaaggggcaagaggaaaaacaacctaaaaagcagcctaagaaggatgaagagggccagaaggaagaagataagccaagaaaagagccggataaaaaagaggggaagaaagaagttgaatcaaaaaggaaaaatttagctaaaacaggggttacttcaacctccgattctgaagaagaaggagatgatcaagaaggtgaaaagaagagaaaaggtgggaggaactttcagactgctcacagaaggaatatgctgaaaggccaacatgagaaagaagcagcagatcgaaaacgcaagcaagaggaacaaatggaaactgagcagcagaataaagatgaaggaaagaagccagaagttaagaaagtggagaagaagcgagaaacatcaatggattctcgacttcaaaggatacatgctgagattaaaaattcactcaaaattgataatcttgatgtgaacagatgcattgaggccttggatgaacttgcttcacttcaggtcacaatgcaacaagctcagaaacacacagagatgattactacactgaaaaaaatacggcgattcaaagttagtcaggtaatcatggaaaagtctacaatgttgtataacaagtttaagaacatgttcttggttggtgaaggagattccgtgatcacccaagtgctgaataaatctcttgctgaacaaagacagcatgaggaagcgaataaaaccaaagatcaagggaagaaagggccaaacaaaaagctagagaaggaacaaacagggtcaaagactctaaatggaggatctgatgctcaagatggtaatcagccacaacataacggggagagcaatgaagacagcaaagacaaccatgaagccagcacgaagaaaaagccatccagtgaagagagagagactgaaatatctctgaaggattctacactagataactaggttgacatacctggaatatagagaacacttgagaagtttgtaatggttttcatttgaaatagactgctgaaagttttaaatttttataagcataggtttgatgttgaaaacttgttttgagggagaaaatccctttgttttaaagtaaagtaaacattatcgctaagtgtacttgtgcagtattaacagctacattatacagtaaatgtgggataaaatccatttagaaaatgttaaactgcttttccagacatggttgtagcatattttcaattagtgtgtgtatgttaatgtgtaattgatagtagaacaaagttacatttttaaaactgctacttgtataaaccttgcctcttttcccaaatactgtgggttttgtgcatagtttttacaaaccttggatttaccagactgtcttttcactgtttgtgggttttgtagaagttacacatttttatggtagataaaatgttacttctatacaagtactcactccctttttatcaaaagttaattttaatctcacagtctacattgtgctacattatccagcttctttggaacaatgtgtgctctgtatggttttttttggtatgacaactaattaagcaactgacatggaactgagaattctacaaactataaaacattaatttttgaaggtaatttagttttgtggctgggcattcagtgaagtcttaggacttctttgcagacaactgactgggtatatataggaatgaatctggctttagggttaaatcatttaaggtccttttataggcaggcactagtaactaaaactgaaaactaagtaagtttatttttgaggaatgttgttaaaaatgtctttaggaagtcactaaaacttaattggaagaaaaaatcatgatgcttatacaataaatatgaataaatgttatataaggaaactcacctatttgaaatcatggctatattgtttttattttctagattccaaaaatacaaacactagttgttccagcattgtactttgataagtctgtacattgacgtgtatggactaaatccagggtaaaatcaatgttacaaaatttaagggtatgttaactaaaggatagcatttctaagatattttgaatattagggtcatttggcacttctcagcaagtaggatacttctcatgttttgaaattatatgaatatggaaaaaaatggcttaagaccagcgtctctgtatgacattgtgtggttgaccctctgagataactgttttcatctacagaattgcatttttgcttttaaagaggtcttataatggaactaggaatcaccgttttgagagaacctgcatatataccagtcattatctgtttggtccttatacagttttaacttacttagatttattctagttaagccataagttcaacgtgtaaacttgttttcattaaagaatttttctatcaaaaaaaaaaaaaaaaaaaaaa

SEQ ID NO: 1488 - DNA, 3396 bp, Homo sapiens
cagtgctagcgggcgccgagcgggagccgcgcgggagcagcgcagctacggcggcggcagcggcggcgcggttgcgattccgagccgttgagacgcctctgcggcagctggtggcgcaggtggcttgcgtggacgcgggtagaggcgaccggccagcaaccgcagcgtcggcgcccgcggccccggcagcaggcgcgtcgggacgccccgaggcatcctcccccgcccgcgggcccggtagctgggcccgcgtccgccgcccgcatccccgcgccgccgcatctcctcgccgcctcccgggcttcggacccccggtctcgcccccgaaacatgactcgcgatttcaaacctggagacctcatcttcgccaagatgaaaggttatccccattggccagctcgagtagacgaagttcctgatggagctgtaaagccacccacaaacaaactacccattttcttttttggaactcatgagactgcttttttaggaccaaaggatatatttccttactcagaaaataaggaaaagtatggcaaaccaaataaaagaaaaggttttaatgaaggtttatgggagatagataacaatccaaaagtgaaattttcaagtcaacaggcagcaactaaacaatcaaatgcatcatctgatgttgaagttgaagaaaaggaaactagtgtttcaaaggaagataccgaccatgaagaaaaagccagcaatgaggatgtgactaaagcagttgacataactactccaaaagctgccagaagggggagaaagagaaaggcagaaaaacaagtagaaactgaggaggcaggagtagtgacaacagcaacagcatctgttaatctaaaagtgagtcctaaaagaggacgacctgcagctacagaagtcaagattccaaaaccaagaggcagacccaaaatggtaaaacagccctgtccttcagagagtgacatcattactgaagaggacaaaagtaagaaaaaggggcaagaggaaaaacaacctaaaaagcagcctaagaaggatgaagagggccagaaggaagaagataagccaagaaaagagccggataaaaaagaggggaagaaagaagttgaatcaaaaaggaaaaatttagctaaaacaggggttacttcaacctccgattctgaagaagaaggagatgatcaagaaggtgaaaagaagagaaaaggtgggaggaactttcagactgctcacagaaggaatatgctgaaaggccaacatgagaaagaagcagcagatcgaaaacgcaagcaagaggaacaaatggaaactgagcagcagaataaagatgaaggaaagaagccagaagttaagaaagtggagaagaagcgagaaacatcaatggattctcgacttcaaaggatacatgctgagattaaaaattcactcaaaattgataatcttgatgtgaacagatgcattgaggccttggatgaacttgcttcacttcaggtcacaatgcaacaagctcagaaacacacagagatgattactacactgaaaaaaatacggcgattcaaagttagtcaggtaatcatggaaaagtctacaatgttgtataacaagtttaagaacatgttcttggttggtgaaggagattccgtgatcacccaagtgctgaataaatctcttgctgaacaaagacagcatgaggaagcgaataaaaccaaagatcaagggaagaaagggccaaacaaaaagctagagaaggaacaaacagggtcaaagactctaaatggaggatctgatgctcaagatggtaatcagccacaacataacggggagagcaatgaagacagcaaagacaaccatgaagccagcacgaagaaaaagccatccagtgaagagagagagactgaaatatctctgaaggattctacactagataactaggttgacatacctggaatatagagaacacttgagaagtttgtaatggttttcatttgaaatagactgctgaaagttttaaatttttataagcataggtttgatgttgaaaacttgttttgagggagaaaatccctttgttttaaagtaaagtaaacattatcgctaagtgtacttgtgcagtattaacagctacattatacagtaaatgtgggataaaatccatttagaaaatgttaaactgcttttccagacatggttgtagcatattttcaattagtgtgtgtatgttaatgtgtaattgatagtagaacaaagttacatttttaaaactgctacttgtataaaccttgcctcttttcccaaatactgtgggttttgtgcatagtttttacaaaccttggatttaccagactgtcttttcactgtttgtgggttttgtagaagttacacatttttatggtagataaaatgttacttctatacaagtactcactccctttttatcaaaagttaattttaatctcacagtctacattgtgctacattatccagcttctttggaacaatgtgtgctctgtatggttttttttggtatgacaactaattaagcaactgacatggaactgagaattctacaaactataaaacattaatttttgaaggtaatttagttttgtggctgggcattcagtgaagtcttaggacttctttgcagacaactgactgggtatatataggaatgaatctggctttagggttaaatcatttaaggtccttttataggcaggcactagtaactaaaactgaaaactaagtaagtttatttttgaggaatgttgttaaaaatgtctttaggaagtcactaaaacttaattggaagaaaaaatcatgatgcttatacaataaatatgaataaatgttatataaggaaactcacctatttgaaatcatggctatattgtttttattttctagattccaaaaatacaaacactagttgttccagcattgtactttgataagtctgtacattgacgtgtatggactaaatccagggtaaaatcaatgttacaaaatttaagggtatgttaactaaaggatagcatttctaagatattttgaatattagggtcatttggcacttctcagcaagtaggatacttctcatgttttgaaattatatgaatatggaaaaaaatggcttaagaccagcgtctctgtatgacattgtgtggttgaccctctgagataactgttttcatctacagaattgcatttttgcttttaaagaggtcttataatggaactaggaatcaccgttttgagagaacctgcatatataccagtcattatctgtttggtccttatacagttttaacttacttagatttattctagttaagccataagttcaacgtgtaaacttgttttcattaaagaatttttctatcaaaaaaaaaaaaaaaaaaaaaa

SEQ ID NO: 1489 - DNA, 2740 bp, Homo sapiens
ccccagtgctagctgccgaagcacccagataagagctggacggaggctaaagcggcagccccagcttcgcgccccgcccagtccctttcccctgctggggatcccccctcttccccgcccaccccttacccgcatgcagcccagcgccctatgctagccctccccctccccccctgctggagcggggcgccgccgggggaggagggggaatcggctgcgggtccttggtgtttccagcacccagtttcccttcaagccgggtcgcgatgtacgactgtatggaaacgtttgccccgggtccgcgacggctgtacggggcggccgggcccggggccggcttgctgcgcagagccaccggcggctcctgtttcgccggacttgaatcttttgcctggccgcaacccgccagcctgcaatcggtggagacacagagcaccagctcagaggagatggtgcccagctcgccctcgccccctccgcctcctcgggtctacaagccatgcttcgtgtgcaatgacaagtcctctggctaccactatggggtcagctcttgtgaaggctgcaagggcttctttcgccgaagcatccagaagaacatggtgtacacgtgtcaccgcgacaaaaactgtatcatcaacaaggtgaccaggaatcgctgccagtactgccggctacagaagtgcttcgaagtgggcatgtccaaggaagctgtgcgaaatgaccggaacaagaagaagaaagaggtgaaggaagaagggtcacctgacagctatgagctgagccctcagttagaagagctcatcaccaaggtcagcaaagcccatcaggagactttcccctcgctctgccagctgggcaagtataccacgaactccagtgcagaccaccgcgtgcagctggatctggggctgtgggacaagttcagtgagctggctaccaagtgcatcatcaagatcgtggagtttgccaagcggttgcctggctttacagggctcagcattgctgaccagatcactctgctcaaagctgcctgcctagatatcctgatgctgcgtatctgcacaaggtacaccccagagcaggacaccatgaccttctccgacgggctgaccctgaaccggacccagatgcacaatgccggcttcgggcccctcacagaccttgtctttgcctttgctgggcagctcctgcccctggagatggatgacaccgagacagggctgctcagcgccatctgcctcatctgcggagaccgcatggacctggaggagcccgaaaaagtggacaagctgcaggagccactgctggaagccctgaggctgtacgcccggcgccggcggcccagccagccctacatgttcccaaggatgctaatgaaaatcaccgacctccggggcatcagcactaagggagctgaaagggccattactctgaagatggagattccaggcccgatgcctcccttaatccgagagatgctggagaaccctgaaatgtttgaggatgactcctcgcagcctggtccccaccccaatgcctctagcgaggatgaggttcctgggggccagggcaaagggggcctgaagtccccagcctgaccagggcccctgacctccccgctgtgggggttggggcttcaggcagcagactgaccatctcccagaccgccagtgactgggggaggacctgctctgccctctccccaccccttccaatgagctccttgtttttgccaaagtttctaggggtgcctctgtgttcatccccttcctgatctaaccggctccctcgccagtcccgggggcctgccctgctcccaccaggagagagggcaaagggatgagcctgggtttggactctaaaatctcagcactgccccatgggtcctagacttcccagggcaagaggaagaccctgccattccacagccccttcctctgccaggtgcttggctctctgagagcaaacaggaacactagagaccaaaaaggggacaaaggagaagggctgagcccaccttcttgctcctacccttggtgcctaatgctgtgtgatgcacctgcagggtgtgtgctagcctctgtgccccgtccttgtgccaggtcaaggtgggggcaggctgggccctgcatttctggggcaggaacagagggtgaaagggacagatagatgcaggtccattctgcacctcttggctcgggtgcagagttcaccctgtgccctccgttataagtccctcccccagccctgtcatgtgccttgggctcctcctgccctccatctcagccattggggcagggaccctcctacactacagaggggccaggggatccctctctccctagtgccttccaccctttactccccagagcagcttggcccagggaggggggatgctgcttagctgatcccgccctgacccagaggaagcctctatttatttattagcttttgtttacaccgtggaattgaccccttcctccaggggtcttgggtgggggagcccagggcccctgtgacccctcctttcttcctccaatccccagtttgtatttagctgccaaataagattcccattggctccctgtgttctcttggggggtcagggtgctgtcccctcccctctgtttacatctcccctctaccccgctgtatcgcatattgctgagttttctatttttgcaaaataaagtgatggaaactcaaaaaaaaaaaaaaaaaaaaaaaaaaaaaaaaaaaa

SEQ ID NO: 1490 - DNA, 10998 bp, Homo sapiens
gattcacagggcctctgagcattatcccccatactcctccccatcattctccacccagctgttggagccatctgtctgatcaccttggactccatagtacactggggcaaagcacagccccagtttctggaggcagatgggtaaccaggaaaaggcatgaatgagggggccccaggagacagtgacttagagactgaggcaagagtgccgtggtcaatcatgggtcattgtcttcgaactggacaggccagaatgtctgccacacccacacctgcaggtgaaggagccagaagggatgaactttttgggattctccaaatactccatcagtgtatcctgtcttcaggtgatgcttttgttcttactggcgtctgttgttcctggaggcagaatggcaagccaccatattcacaaaaggaagataaggaagtacaaactggatacatgaatgctcaaattgaaattattccatgcaagatctgtggagacaaatcatcaggaatccattatggtgtcattacatgtgaaggctgcaagggctttttcaggagaagtcagcaaagcaatgccacctactcctgtcctcgtcagaagaactgtttgattgatcgaaccagtagaaaccgctgccaacactgtcgattacagaaatgccttgccgtagggatgtctcgagatgctgtaaaatttggccgaatgtcaaaaaagcagagagacagcttgtatgcagaagtacagaaacaccggatgcagcagcagcagcgcgaccaccagcagcagcctggagaggctgagccgctgacgcccacctacaacatctcggccaacgggctgacggaacttcacgacgacctcagtaactacattgacgggcacacccctgaggggagtaaggcagactccgccgtcagcagcttctacctggacatacagccttccccagaccagtcaggtcttgatatcaatggaatcaaaccagaaccaatatgtgactacacaccagcatcaggcttctttccctactgttcgttcaccaacggcgagacttccccaactgtgtccatggcagaattagaacaccttgcacagaatatatctaaatcgcatctggaaacctgccaatacttgagagaagagctccagcagataacgtggcagacctttttacaggaagaaattgagaactatcaaaacaagcagcgggaggtgatgtggcaattgtgtgccatcaaaattacagaagctatacagtatgtggtggagtttgccaaacgcattgatggatttatggaactgtgtcaaaatgatcaaattgtgcttctaaaagcaggttctctagaggtggtgtttatcagaatgtgccgtgcctttgactctcagaacaacaccgtgtactttgatgggaagtatgccagccccgacgtcttcaaatccttaggttgtgaagactttattagctttgtgtttgaatttggaaagagtttatgttctatgcacctgactgaagatgaaattgcattattttctgcatttgtactgatgtcagcagatcgctcatggctgcaagaaaaggtaaaaattgaaaaactgcaacagaaaattcagctagctcttcaacacgtcctacagaagaatcaccgagaagatggaatactaacaaagttaatatgcaaggtgtctacattaagagccttatgtggacgacatacagaaaagctaatggcatttaaagcaatatacccagacattgtgcgacttcattttcctccattatacaaggagttgttcacttcagaatttgagccagcaatgcaaattgatgggtaaatgttatcacctaagcacttctagaatgtctgaagtacaaacatgaaaaacaaacaaaaaaattaaccgagacactttatatggccctgcacagacctggagcgccacacactgcacatcttttggtgatcggggtcaggcaaaggaggggaaacaatgaaaacaaataaaagttgaacttgtttttctcatgcatatgatttccattatgcctacagatatggaccctttttctgtcttgacttcttgatcattgacctctgtttacaacaggaggagggtactaaagtcggaggatttccttttcttgtagctcactgcccacagactttctacagagtcaccaatctgtcagtaacaacagagagtccagcaataatcggtgactggtgtgcatagcggaggttgcggcattactttgcacaactagctctttgtttcatgaaggaagtttttattttttcaccgattattgccagtccgcaggatggcatgaaaagggtccatagcagtagcaacaatagcattataatatattacagggtaaatgggcatgaagactatatatagctaaaagagatattgtttatatattgttttaagtaatataaaatgtagttactggtgtagcttttcctgttgaattgataaggcactttcattttgcacctttttctttaaattaaatgctagcgtgttcactgtcgtgtcgcatgtgcaccagaaacacaagtttaactgagaaggcttggaaggtacgttgggaggtatttatgctgctgtttacaaaattatttttaagagactggctggtcatatctagaaatcaccacgttggattttttttttaacatgtgaatttggaattagaaacggaactctccctaaattatactttgctttttggtaagtttaatgatagatgtgtttatgcttcatacaaagttgaatgattgattggcgtggtggacatataccatcatgctcattttttttttttaaagctttttaaaatgccacctcatggaggcgagggggaggagaagctcattttacacaattcagtagttaaatatggactcggtctcaacttggaattcttatgctttgagaacaaatcaacaaccagaatatttattggaatctagcttttattataagaaggacccaaagattatatcctgagcaaatgcacactccccatgtgaggacatgaagtatttactttgtgaatgtttatgttcttggtataatctaggaaccctatgagtttatctcagagtgaactaattctagatttgttgtcaatagatgctataattcaagaatgttgctctccatatttgaaaaacgatggataggagggtgagggaagcatacaatgttgaaccagtttctcttatttaaatattaaatactttaagcctttaaagtgaagttgatgctagctgcaaacatttactcttgtatttatcttcactaggaaactgtggactgtaatttattttattaaatatttagaagattatttggcttgtgtgttcaggtgagaaatactgagttgtttttgtttaatttcatggtttttttttttttaatgatccctagtgggggaaggggaaaggaatagtctgataaacagatgtgcatattttaaaaacaagtgaccttttgggaatgtaggcatttagacgatgattttagtcgcactaggggtgggattcaaactactggtcaaagaccattttgtacagaaaagggaacatctccgatgggtgttaaggtaggagtttccatgcagccctttatgtctgagaaatagtctcctctgccattggggtccctgcggaatcttctacaggaattgcagctcttcacgtcatgctaggttaccagcatgggcttcccagagcacttcactctgtttctaactccactgacttttctgacttgtttcttgagggacttggaaaaggggaaggtattattcacacagatgtgtgtatgaagcctaaataacatccaactttttttccaaaaacatagtaagagtttaaccataaatagaagagtaatattcctttaaatttcttacaggcatgtaaaattttatgtgtttatagagagatgctaactgtcagcatatagtatttatattggggcaagaagggttaaatcaaatctttaatttaagtaagcatagttcctttaaagatcagtagtatttatactctgaaaagagtaccaagcttagttcagttatttattcatccattttttttctattgtttctcctctggggggaaatggtgttttgtttttgtttgagttttgtgttttagttttttggttttggttttgttttgtttttttgtcattcagattcactaaatttggggatggttttattaaagtatattaacttctttttaaccaaagctttctgaatatgaccagcctcaggtgctagcgcattaaagagcaactaaacctaattccagtgtcgatttgtgaaataataaaagctaattgaatttctctaagggtgagagagaacataatgatgaacttaaaaagaaattccttttcccagaagggattctgcatgtacctacaaacaatcatgctctaaccacagtaatagtcatgccatggtgacattgcttttacggtaaaccaagataggtaatatgatgcttcttcccaggtgtttctgaaagaaaagcagcggtggagcttaagagccaagtccactgattgacataataggatggaattgtagacagagacatgctccatgaaacaaggaaacaactgactactatttggatctaagttgggatctgatgttaaacaataaattcagtttaaaaaaaatatggagctcagaaaaggatgtgaaaaactttgcattttcctttcttcattattacaaaaacacctatgtgatgacataaaatacttgggtgatatcagaacaattatccttaatagtttttataattaaagtttcctaaacttcagtctccaatagtcttttaaggattggaaccacatcactgtcagccccgctgctacaatgcctttgtacaatttttttacataaggcaaataaggcttttgtacaaagcctgaataccttctgttccaatggtgtccaaatggttattatattgtgaaaaacctggccttggtcacaatgcaaacaaaagtacagatgaaagtgctttttggacagtttgcaaattgtgttaaagctacggattttttttaaagtgttcagcatcttaacgtgtattaaagctatggatttttttttaaagtcttcagcatcctaattcaccctttctaacttaagaaaaacatgacttaagacactgcttctaagtttggttgttctttatagtgtggatacccagttatctgtgagcgtatgggggtgggctgagggtcaggtgaggaaggagtgtgtgtgtgtgtgtgtgtgtgtgtgtgtgtgtgtgtgatttgcatgtgtatgatgtgtgtgcgtcggaccgcttctaggctactaagtgtcaatggaaaagaaaatgtattcaaaatacttaaatcaaaactagaagatggggaaaaaaagatttattctatacaaagccttgtctggaccactttagagagacttctatttttttaacccttctataaatatttgatggcacttgaaatattcctgcaataaaatgtgatttgtgtaaagaaaaaaagattttgtaatgtgaaacaaagaaagaaagtaatgtaattttctaaaaaaaaaaatacaaacaaacaaactttgtattattttcttgatggaatttgtctatctgtctttggaaaactttttatttcattgaatgtgccatagtagaaatgtgtgtttttagttttagactaaggaatagctagttgttgtgttccgacattccaaaatgcaaaacaacctagtagtatctttcatgaaaaggtttaagtagtatgtaagcttctctcattgttgcttttttgcacatgttcttcattcctctctagtgcaatatgtacatagagcacttgcgggtgtaccttgatccctcagggaaaaatacatatttgtacagttttttggggtttttttgttttttggttttttttgttttgccttttgtttttggctaaggaatgtcgatcgaatcacttgttattgttgaggggcagccagataataatcctaaagccactgtttccaacattgattgtttaaatcatatgtccttccaatgctattattttaagataataataaaaagttattttctgacagttctttgtgctgactggtgaaaaacaagggtaaataagcaccttataattgacttactgtgaatgacaatccatcttggtatcaacgatagaagccctatcattttggagttggggttaagagtcagaaacaatgtgctcagggatctcctaaaactcttaaaacagggtggccagtactactgggacaaattgtgttttttattattaataataatgataataatactatccctccaaggcacaagtgaactatatagaactgcgtgtgtgtaaactctttactctcgtctcattttgttgagtttagaacttgatgtgctcgtcagtcttgtgtttcaaaacactgaataacttccaaagcaaagttatgccagtgtgttcaaaagataaattaataatgtaccagcaaagagcatcattcaaagtatagtccttgcatattccagttaccatttctctaataattaaaatattcatgataaatatatatatagcatcatatgttaaaaactatttcaaattctacatattaaggatgaaaattttaaaatccagtaataagaggagagacctgcctatcagtacagtgatataggtaaaagatgaaatatgtttttaaaataccagcaattaactattgttttcatgggttctcctctagaagcaaaccaaaaattccttcatggaaaacaattcttacttctacatgtgtagtttatatctgatgcattacaagagctaatgtttaaagacaaaacaaaacctgcctgtatgacagcagcaactcgagccaacatttagtgttacatgttatatttttgaaataccgttttgttatcatattccacatattactttccataaagtcagagaagttcaatgtaattgttggctctgattcttccaccttgggatacacattcacaagaagatttatatattttcttactatgatagaggaacataatctgggaaaacttcccatgtctgtaagatgaaaaggatacctttaccatgttgtttttgataataaagaatatggaaaatggtagaaatctctcctctctatgtgtatttgtatatgtgtgtatacacacacacgttgacatttttacataacatgtgattgccacttcttataaagttatgatatagaaccccatgaaaacaactttatattatagatcaaataatgtgcccagaaacgcaattgcaacagtaaatcttgatctattggtaagagtctatgatacaggtcttcattctatccctaaacataatgttagtaaagaggttccatcagattgtattatagagaccttcctattgctatttatttttaagagatgagaagactgactagcaatgtctccacagtgcaattggtttcacttctgggtctgtctgtctgtttgtgtaggtgagatcagtgttgtcaggctctcagaataatttttaaaagaatccagaagcctgacttcacaccaagtagccatcctagatgggcgggggggatctccatgttcaaccaaaccctcagaacttagagcaataaatacattcagtcatttatttataaatgaatgacagaatattcaatccaaatagaaacaaccttttgtcagtgatgcaacataacatggagtcttatattgagaaagtgaatatgaatattttaaatagatgcctaggaaatctgtgtttgctgtttacatttaatgtactttgccacattagcagtaccacacttcttttactttcatccttctaagaactaatgaaagatagcttgctattagctttgacatgttgcacatgccattatgttgttctctaagaacaactaaattctctccagtgttcatgtgtgattcctttttcatcattattactttaatgtggatgaatactatttctaggaacttgattatcactgaacagattgcatatgtaaatgcagataattcttgagcaatatagtgaaaatgatttcacaaaaaaaatccatatgtactgtatacatcttcctgaatccaaaattctcctgttatccacacagtttgaaatctcatattaaacagtggtaaatttttaaacattaggacattagctggctgcttctataaatgtacctgtattgtctgcctgctccttttgtggagatgtgtttttgtattggatgtttgggccaatgggaggcttcaagctacaacatattttcccactttaaataatatttaacatatgacaaaccccagacaaggcttttaatatgtataaagaactgcagtgttaggtggtttatttgcaaactgttttcagtgttgtccatttttatggcacctttaacaatattcttgtttccaaagtacaaaaaaaataggttaaataatctagccataactgaatgtcaagcaataaaacaaatgacttttgtgcatagacttaaaaaatacaaattttagacatctgcatgtaaatgcaatctcttgtttactgctttcttcaacttgagcaatcgattccttatttactattaacttaagaacttgtaacggcctgtaaacattttctctcttactcttctttcaaatttacctgtccctgcttttgagtcataatatttaatgttgttctgcacatctctatacagttaactttttggctttcattctgtatagataagaaaatgttatattataaacagcctactcagtgcaaatatttatctgtttatcaaatccacaatatgctgtataataccggttttactatataatctattttagacatagctgtttagaactagagtgtgctatttttgtgtttttctgatgtgtggtgctagacaagttacttttgtgaacaacaaaaattatcccttttattcctagacaataccacctttgggtcttgttaatttcactgagtataactatatatttgtatatatatacatatatatatatatctacctatgcccaactggcagctgtatcagagtgctggatttgggacatgcttttctctttaaatacataatatcattatataaattattctagagtgtatttaattaggataaaattacttccttagtatggatatttgacatctatagggtgaatttgtttataaatatggctatatggaaacttattagcatttactttatgtttgctacttggctttacagcatatctcctaagctgaaaaataatttgccaggccttcaagatcctaaagaaacttgtttaatggagtaatatacttttttttcttattaaggaattgtattactggcacctaacacagttgtattcttagctcctattatagataatgggcatttacataaaatatcctagatggcttgatggcagaataaacctttcccctcctacctgagtcatgagaaggatggagacgtcctctgccataacatgggccataaagcaaattcgacatgggatgttctgtttcagtatgacctcaaccagttccatgaactgagtgaaggaccttcattttcaaagttatttaataagtagcttaattaagcctttctacccattctcccaagatctactggcattattgaaaagcaaagtttatcaaatatctaactaaggatgtagttaaccttattaaatattgattagaattgttctgtaatattactgaatttgtaagatctttagcaaagatttttgagcaatttataaatgtagagcaaatgtttctgtttactgcactttttgtaactgaaggtgataaattctcaagccatgattattggcttccatgcactgcaatatttatccacaattctagacattttccatttttgtggaagagttgctgttaccttaattataaatgcaattgtgtggttaatgagagctaatgctagtagttaaccttttaaagtggattggctacagttgagggagaaatctcttttaatataaatcacatcattccttaactgcctctcttggaaagagattgaaaccttttttttaaagcacgatttagcatcctaagcttcctgagggtagagattgtatctttttgcgtctgcacaatggctagcacatgtcagcatttgacaattgttaaatgataacaagtgtgccccaattaaaacgtttttcctgggttgttttgttaaatttacaaagtaagccaagccttacggttaacattctcctctacaaccaagtattaaagccacatttaaaaagaccacatgaaatgctgattctaattgtgtgtaggtcttgaggattaagcacacaaatttcacaaacttctgtttgagtaaacaaactcagccttctgtaaatatacatgcaagtttggaaacagtaatactgtacctataaatatatgctgtctgttttgtgtacagtatgtaaaaactccttttctgccacactaaaaatgcaagccatttatgggaatcctaaaactagtattgaactaaaactttgctaatgatctttattagaggatcgtccaacttttcacttaccttgggttttcttttcaattcactcttacactagtctgcttatttccagctgtttattttattgagtcctgaatttaaaaaaaaaatattttgattcattttgtaaatacaagctgtacaaaaaagagagatttaatgttgtcttttaaatactccaattttcattctaatatgaatgttgttatattgtacttagaaactgtacctttaatattacattacctttattaaaagtgcattgaacacatcaattttagatgtgctttatgtactgttatcctataataaaacttcagcttctaatggaa

SEQ ID NO: 1491 - DNA, 10974 bp, Homo sapiens
gattcacagggcctctgagcattatcccccatactcctccccatcattctccacccagctgttggagccatctgtctgatcaccttggactccatagtacactggggcaaagcacagccccagtttctggaggcagatgggtaaccaggaaaaggcatgaatgagggggccccaggagacagtgacttagagactgaggcaagagtgccgtggtcaatcatgggtcattgtcttcgaactggacaggccagaatgtctgccacacccacacctgcaggtgaaggagccagaagctcttcaacctgtagctccctgagcaggctgttctggtctcaacttgagcacataaactgggatggagccacagccaagaactttattaatttaagggagttcttctcttttctgctccctgcattgagaaaagctcaaattgaaattattccatgcaagatctgtggagacaaatcatcaggaatccattatggtgtcattacatgtgaaggctgcaagggctttttcaggagaagtcagcaaagcaatgccacctactcctgtcctcgtcagaagaactgtttgattgatcgaaccagtagaaaccgctgccaacactgtcgattacagaaatgccttgccgtagggatgtctcgagatgctgtaaaatttggccgaatgtcaaaaaagcagagagacagcttgtatgcagaagtacagaaacaccggatgcagcagcagcagcgcgaccaccagcagcagcctggagaggctgagccgctgacgcccacctacaacatctcggccaacgggctgacggaacttcacgacgacctcagtaactacattgacgggcacacccctgaggggagtaaggcagactccgccgtcagcagcttctacctggacatacagccttccccagaccagtcaggtcttgatatcaatggaatcaaaccagaaccaatatgtgactacacaccagcatcaggcttctttccctactgttcgttcaccaacggcgagacttccccaactgtgtccatggcagaattagaacaccttgcacagaatatatctaaatcgcatctggaaacctgccaatacttgagagaagagctccagcagataacgtggcagacctttttacaggaagaaattgagaactatcaaaacaagcagcgggaggtgatgtggcaattgtgtgccatcaaaattacagaagctatacagtatgtggtggagtttgccaaacgcattgatggatttatggaactgtgtcaaaatgatcaaattgtgcttctaaaagcaggttctctagaggtggtgtttatcagaatgtgccgtgcctttgactctcagaacaacaccgtgtactttgatgggaagtatgccagccccgacgtcttcaaatccttaggttgtgaagactttattagctttgtgtttgaatttggaaagagtttatgttctatgcacctgactgaagatgaaattgcattattttctgcatttgtactgatgtcagcagatcgctcatggctgcaagaaaaggtaaaaattgaaaaactgcaacagaaaattcagctagctcttcaacacgtcctacagaagaatcaccgagaagatggaatactaacaaagttaatatgcaaggtgtctacattaagagccttatgtggacgacatacagaaaagctaatggcatttaaagcaatatacccagacattgtgcgacttcattttcctccattatacaaggagttgttcacttcagaatttgagccagcaatgcaaattgatgggtaaatgttatcacctaagcacttctagaatgtctgaagtacaaacatgaaaaacaaacaaaaaaattaaccgagacactttatatggccctgcacagacctggagcgccacacactgcacatcttttggtgatcggggtcaggcaaaggaggggaaacaatgaaaacaaataaaagttgaacttgtttttctcatgcatatgatttccattatgcctacagatatggaccctttttctgtcttgacttcttgatcattgacctctgtttacaacaggaggagggtactaaagtcggaggatttccttttcttgtagctcactgcccacagactttctacagagtcaccaatctgtcagtaacaacagagagtccagcaataatcggtgactggtgtgcatagcggaggttgcggcattactttgcacaactagctctttgtttcatgaaggaagtttttattttttcaccgattattgccagtccgcaggatggcatgaaaagggtccatagcagtagcaacaatagcattataatatattacagggtaaatgggcatgaagactatatatagctaaaagagatattgtttatatattgttttaagtaatataaaatgtagttactggtgtagcttttcctgttgaattgataaggcactttcattttgcacctttttctttaaattaaatgctagcgtgttcactgtcgtgtcgcatgtgcaccagaaacacaagtttaactgagaaggcttggaaggtacgttgggaggtatttatgctgctgtttacaaaattatttttaagagactggctggtcatatctagaaatcaccacgttggattttttttttaacatgtgaatttggaattagaaacggaactctccctaaattatactttgctttttggtaagtttaatgatagatgtgtttatgcttcatacaaagttgaatgattgattggcgtggtggacatataccatcatgctcattttttttttttaaagctttttaaaatgccacctcatggaggcgagggggaggagaagctcattttacacaattcagtagttaaatatggactcggtctcaacttggaattcttatgctttgagaacaaatcaacaaccagaatatttattggaatctagcttttattataagaaggacccaaagattatatcctgagcaaatgcacactccccatgtgaggacatgaagtatttactttgtgaatgtttatgttcttggtataatctaggaaccctatgagtttatctcagagtgaactaattctagatttgttgtcaatagatgctataattcaagaatgttgctctccatatttgaaaaacgatggataggagggtgagggaagcatacaatgttgaaccagtttctcttatttaaatattaaatactttaagcctttaaagtgaagttgatgctagctgcaaacatttactcttgtatttatcttcactaggaaactgtggactgtaatttattttattaaatatttagaagattatttggcttgtgtgttcaggtgagaaatactgagttgtttttgtttaatttcatggtttttttttttttaatgatccctagtgggggaaggggaaaggaatagtctgataaacagatgtgcatattttaaaaacaagtgaccttttgggaatgtaggcatttagacgatgattttagtcgcactaggggtgggattcaaactactggtcaaagaccattttgtacagaaaagggaacatctccgatgggtgttaaggtaggagtttccatgcagccctttatgtctgagaaatagtctcctctgccattggggtccctgcggaatcttctacaggaattgcagctcttcacgtcatgctaggttaccagcatgggcttcccagagcacttcactctgtttctaactccactgacttttctgacttgtttcttgagggacttggaaaaggggaaggtattattcacacagatgtgtgtatgaagcctaaataacatccaactttttttccaaaaacatagtaagagtttaaccataaatagaagagtaatattcctttaaatttcttacaggcatgtaaaattttatgtgtttatagagagatgctaactgtcagcatatagtatttatattggggcaagaagggttaaatcaaatctttaatttaagtaagcatagttcctttaaagatcagtagtatttatactctgaaaagagtaccaagcttagttcagttatttattcatccattttttttctattgtttctcctctggggggaaatggtgttttgtttttgtttgagttttgtgttttagttttttggttttggttttgttttgtttttttgtcattcagattcactaaatttggggatggttttattaaagtatattaacttctttttaaccaaagctttctgaatatgaccagcctcaggtgctagcgcattaaagagcaactaaacctaattccagtgtcgatttgtgaaataataaaagctaattgaatttctctaagggtgagagagaacataatgatgaacttaaaaagaaattccttttcccagaagggattctgcatgtacctacaaacaatcatgctctaaccacagtaatagtcatgccatggtgacattgcttttacggtaaaccaagataggtaatatgatgcttcttcccaggtgtttctgaaagaaaagcagcggtggagcttaagagccaagtccactgattgacataataggatggaattgtagacagagacatgctccatgaaacaaggaaacaactgactactatttggatctaagttgggatctgatgttaaacaataaattcagtttaaaaaaaatatggagctcagaaaaggatgtgaaaaactttgcattttcctttcttcattattacaaaaacacctatgtgatgacataaaatacttgggtgatatcagaacaattatccttaatagtttttataattaaagtttcctaaacttcagtctccaatagtcttttaaggattggaaccacatcactgtcagccccgctgctacaatgcctttgtacaatttttttacataaggcaaataaggcttttgtacaaagcctgaataccttctgttccaatggtgtccaaatggttattatattgtgaaaaacctggccttggtcacaatgcaaacaaaagtacagatgaaagtgctttttggacagtttgcaaattgtgttaaagctacggattttttttaaagtgttcagcatcttaacgtgtattaaagctatggatttttttttaaagtcttcagcatcctaattcaccctttctaacttaagaaaaacatgacttaagacactgcttctaagtttggttgttctttatagtgtggatacccagttatctgtgagcgtatgggggtgggctgagggtcaggtgaggaaggagtgtgtgtgtgtgtgtgtgtgtgtgtgtgtgtgtgtgtgatttgcatgtgtatgatgtgtgtgcgtcggaccgcttctaggctactaagtgtcaatggaaaagaaaatgtattcaaaatacttaaatcaaaactagaagatggggaaaaaaagatttattctatacaaagccttgtctggaccactttagagagacttctatttttttaacccttctataaatatttgatggcacttgaaatattcctgcaataaaatgtgatttgtgtaaagaaaaaaagattttgtaatgtgaaacaaagaaagaaagtaatgtaattttctaaaaaaaaaaatacaaacaaacaaactttgtattattttcttgatggaatttgtctatctgtctttggaaaactttttatttcattgaatgtgccatagtagaaatgtgtgtttttagttttagactaaggaatagctagttgttgtgttccgacattccaaaatgcaaaacaacctagtagtatctttcatgaaaaggtttaagtagtatgtaagcttctctcattgttgcttttttgcacatgttcttcattcctctctagtgcaatatgtacatagagcacttgcgggtgtaccttgatccctcagggaaaaatacatatttgtacagttttttggggtttttttgttttttggttttttttgttttgccttttgtttttggctaaggaatgtcgatcgaatcacttgttattgttgaggggcagccagataataatcctaaagccactgtttccaacattgattgtttaaatcatatgtccttccaatgctattattttaagataataataaaaagttattttctgacagttctttgtgctgactggtgaaaaacaagggtaaataagcaccttataattgacttactgtgaatgacaatccatcttggtatcaacgatagaagccctatcattttggagttggggttaagagtcagaaacaatgtgctcagggatctcctaaaactcttaaaacagggtggccagtactactgggacaaattgtgttttttattattaataataatgataataatactatccctccaaggcacaagtgaactatatagaactgcgtgtgtgtaaactctttactctcgtctcattttgttgagtttagaacttgatgtgctcgtcagtcttgtgtttcaaaacactgaataacttccaaagcaaagttatgccagtgtgttcaaaagataaattaataatgtaccagcaaagagcatcattcaaagtatagtccttgcatattccagttaccatttctctaataattaaaatattcatgataaatatatatatagcatcatatgttaaaaactatttcaaattctacatattaaggatgaaaattttaaaatccagtaataagaggagagacctgcctatcagtacagtgatataggtaaaagatgaaatatgtttttaaaataccagcaattaactattgttttcatgggttctcctctagaagcaaaccaaaaattccttcatggaaaacaattcttacttctacatgtgtagtttatatctgatgcattacaagagctaatgtttaaagacaaaacaaaacctgcctgtatgacagcagcaactcgagccaacatttagtgttacatgttatatttttgaaataccgttttgttatcatattccacatattactttccataaagtcagagaagttcaatgtaattgttggctctgattcttccaccttgggatacacattcacaagaagatttatatattttcttactatgatagaggaacataatctgggaaaacttcccatgtctgtaagatgaaaaggatacctttaccatgttgtttttgataataaagaatatggaaaatggtagaaatctctcctctctatgtgtatttgtatatgtgtgtatacacacacacgttgacatttttacataacatgtgattgccacttcttataaagttatgatatagaaccccatgaaaacaactttatattatagatcaaataatgtgcccagaaacgcaattgcaacagtaaatcttgatctattggtaagagtctatgatacaggtcttcattctatccctaaacataatgttagtaaagaggttccatcagattgtattatagagaccttcctattgctatttatttttaagagatgagaagactgactagcaatgtctccacagtgcaattggtttcacttctgggtctgtctgtctgtttgtgtaggtgagatcagtgttgtcaggctctcagaataatttttaaaagaatccagaagcctgacttcacaccaagtagccatcctagatgggcgggggggatctccatgttcaaccaaaccctcagaacttagagcaataaatacattcagtcatttatttataaatgaatgacagaatattcaatccaaatagaaacaaccttttgtcagtgatgcaacataacatggagtcttatattgagaaagtgaatatgaatattttaaatagatgcctaggaaatctgtgtttgctgtttacatttaatgtactttgccacattagcagtaccacacttcttttactttcatccttctaagaactaatgaaagatagcttgctattagctttgacatgttgcacatgccattatgttgttctctaagaacaactaaattctctccagtgttcatgtgtgattcctttttcatcattattactttaatgtggatgaatactatttctaggaacttgattatcactgaacagattgcatatgtaaatgcagataattcttgagcaatatagtgaaaatgatttcacaaaaaaaatccatatgtactgtatacatcttcctgaatccaaaattctcctgttatccacacagtttgaaatctcatattaaacagtggtaaatttttaaacattaggacattagctggctgcttctataaatgtacctgtattgtctgcctgctccttttgtggagatgtgtttttgtattggatgtttgggccaatgggaggcttcaagctacaacatattttcccactttaaataatatttaacatatgacaaaccccagacaaggcttttaatatgtataaagaactgcagtgttaggtggtttatttgcaaactgttttcagtgttgtccatttttatggcacctttaacaatattcttgtttccaaagtacaaaaaaaataggttaaataatctagccataactgaatgtcaagcaataaaacaaatgacttttgtgcatagacttaaaaaatacaaattttagacatctgcatgtaaatgcaatctcttgtttactgctttcttcaacttgagcaatcgattccttatttactattaacttaagaacttgtaacggcctgtaaacattttctctcttactcttctttcaaatttacctgtccctgcttttgagtcataatatttaatgttgttctgcacatctctatacagttaactttttggctttcattctgtatagataagaaaatgttatattataaacagcctactcagtgcaaatatttatctgtttatcaaatccacaatatgctgtataataccggttttactatataatctattttagacatagctgtttagaactagagtgtgctatttttgtgtttttctgatgtgtggtgctagacaagttacttttgtgaacaacaaaaattatcccttttattcctagacaataccacctttgggtcttgttaatttcactgagtataactatatatttgtatatatatacatatatatatatatctacctatgcccaactggcagctgtatcagagtgctggatttgggacatgcttttctctttaaatacataatatcattatataaattattctagagtgtatttaattaggataaaattacttccttagtatggatatttgacatctatagggtgaatttgtttataaatatggctatatggaaacttattagcatttactttatgtttgctacttggctttacagcatatctcctaagctgaaaaataatttgccaggccttcaagatcctaaagaaacttgtttaatggagtaatatacttttttttcttattaaggaattgtattactggcacctaacacagttgtattcttagctcctattatagataatgggcatttacataaaatatcctagatggcttgatggcagaataaacctttcccctcctacctgagtcatgagaaggatggagacgtcctctgccataacatgggccataaagcaaattcgacatgggatgttctgtttcagtatgacctcaaccagttccatgaactgagtgaaggaccttcattttcaaagttatttaataagtagcttaattaagcctttctacccattctcccaagatctactggcattattgaaaagcaaagtttatcaaatatctaactaaggatgtagttaaccttattaaatattgattagaattgttctgtaatattactgaatttgtaagatctttagcaaagatttttgagcaatttataaatgtagagcaaatgtttctgtttactgcactttttgtaactgaaggtgataaattctcaagccatgattattggcttccatgcactgcaatatttatccacaattctagacattttccatttttgtggaagagttgctgttaccttaattataaatgcaattgtgtggttaatgagagctaatgctagtagttaaccttttaaagtggattggctacagttgagggagaaatctcttttaatataaatcacatcattccttaactgcctctcttggaaagagattgaaaccttttttttaaagcacgatttagcatcctaagcttcctgagggtagagattgtatctttttgcgtctgcacaatggctagcacatgtcagcatttgacaattgttaaatgataacaagtgtgccccaattaaaacgtttttcctgggttgttttgttaaatttacaaagtaagccaagccttacggttaacattctcctctacaaccaagtattaaagccacatttaaaaagaccacatgaaatgctgattctaattgtgtgtaggtcttgaggattaagcacacaaatttcacaaacttctgtttgagtaaacaaactcagccttctgtaaatatacatgcaagtttggaaacagtaatactgtacctataaatatatgctgtctgttttgtgtacagtatgtaaaaactccttttctgccacactaaaaatgcaagccatttatgggaatcctaaaactagtattgaactaaaactttgctaatgatctttattagaggatcgtccaacttttcacttaccttgggttttcttttcaattcactcttacactagtctgcttatttccagctgtttattttattgagtcctgaatttaaaaaaaaaatattttgattcattttgtaaatacaagctgtacaaaaaagagagatttaatgttgtcttttaaatactccaattttcattctaatatgaatgttgttatattgtacttagaaactgtacctttaatattacattacctttattaaaagtgcattgaacacatcaattttagatgtgctttatgtactgttatcctataataaaacttcagcttctaatggaa

SEQ ID NO: 1492 - DNA, 10669 bp, Homo sapiens
tgtggctcgggcggcggcggcgcggcggcggcagagggggctccggggtcggaccatccgctctccctgcgctctccgcaccgcggcttaaatgatgtattttgtgatcgcagcgatgaaagctcaaattgaaattattccatgcaagatctgtggagacaaatcatcaggaatccattatggtgtcattacatgtgaaggctgcaagggctttttcaggagaagtcagcaaagcaatgccacctactcctgtcctcgtcagaagaactgtttgattgatcgaaccagtagaaaccgctgccaacactgtcgattacagaaatgccttgccgtagggatgtctcgagatgctgtaaaatttggccgaatgtcaaaaaagcagagagacagcttgtatgcagaagtacagaaacaccggatgcagcagcagcagcgcgaccaccagcagcagcctggagaggctgagccgctgacgcccacctacaacatctcggccaacgggctgacggaacttcacgacgacctcagtaactacattgacgggcacacccctgaggggagtaaggcagactccgccgtcagcagcttctacctggacatacagccttccccagaccagtcaggtcttgatatcaatggaatcaaaccagaaccaatatgtgactacacaccagcatcaggcttctttccctactgttcgttcaccaacggcgagacttccccaactgtgtccatggcagaattagaacaccttgcacagaatatatctaaatcgcatctggaaacctgccaatacttgagagaagagctccagcagataacgtggcagacctttttacaggaagaaattgagaactatcaaaacaagcagcgggaggtgatgtggcaattgtgtgccatcaaaattacagaagctatacagtatgtggtggagtttgccaaacgcattgatggatttatggaactgtgtcaaaatgatcaaattgtgcttctaaaagcaggttctctagaggtggtgtttatcagaatgtgccgtgcctttgactctcagaacaacaccgtgtactttgatgggaagtatgccagccccgacgtcttcaaatccttaggttgtgaagactttattagctttgtgtttgaatttggaaagagtttatgttctatgcacctgactgaagatgaaattgcattattttctgcatttgtactgatgtcagcagatcgctcatggctgcaagaaaaggtaaaaattgaaaaactgcaacagaaaattcagctagctcttcaacacgtcctacagaagaatcaccgagaagatggaatactaacaaagttaatatgcaaggtgtctacattaagagccttatgtggacgacatacagaaaagctaatggcatttaaagcaatatacccagacattgtgcgacttcattttcctccattatacaaggagttgttcacttcagaatttgagccagcaatgcaaattgatgggtaaatgttatcacctaagcacttctagaatgtctgaagtacaaacatgaaaaacaaacaaaaaaattaaccgagacactttatatggccctgcacagacctggagcgccacacactgcacatcttttggtgatcggggtcaggcaaaggaggggaaacaatgaaaacaaataaaagttgaacttgtttttctcatgcatatgatttccattatgcctacagatatggaccctttttctgtcttgacttcttgatcattgacctctgtttacaacaggaggagggtactaaagtcggaggatttccttttcttgtagctcactgcccacagactttctacagagtcaccaatctgtcagtaacaacagagagtccagcaataatcggtgactggtgtgcatagcggaggttgcggcattactttgcacaactagctctttgtttcatgaaggaagtttttattttttcaccgattattgccagtccgcaggatggcatgaaaagggtccatagcagtagcaacaatagcattataatatattacagggtaaatgggcatgaagactatatatagctaaaagagatattgtttatatattgttttaagtaatataaaatgtagttactggtgtagcttttcctgttgaattgataaggcactttcattttgcacctttttctttaaattaaatgctagcgtgttcactgtcgtgtcgcatgtgcaccagaaacacaagtttaactgagaaggcttggaaggtacgttgggaggtatttatgctgctgtttacaaaattatttttaagagactggctggtcatatctagaaatcaccacgttggattttttttttaacatgtgaatttggaattagaaacggaactctccctaaattatactttgctttttggtaagtttaatgatagatgtgtttatgcttcatacaaagttgaatgattgattggcgtggtggacatataccatcatgctcattttttttttttaaagctttttaaaatgccacctcatggaggcgagggggaggagaagctcattttacacaattcagtagttaaatatggactcggtctcaacttggaattcttatgctttgagaacaaatcaacaaccagaatatttattggaatctagcttttattataagaaggacccaaagattatatcctgagcaaatgcacactccccatgtgaggacatgaagtatttactttgtgaatgtttatgttcttggtataatctaggaaccctatgagtttatctcagagtgaactaattctagatttgttgtcaatagatgctataattcaagaatgttgctctccatatttgaaaaacgatggataggagggtgagggaagcatacaatgttgaaccagtttctcttatttaaatattaaatactttaagcctttaaagtgaagttgatgctagctgcaaacatttactcttgtatttatcttcactaggaaactgtggactgtaatttattttattaaatatttagaagattatttggcttgtgtgttcaggtgagaaatactgagttgtttttgtttaatttcatggtttttttttttttaatgatccctagtgggggaaggggaaaggaatagtctgataaacagatgtgcatattttaaaaacaagtgaccttttgggaatgtaggcatttagacgatgattttagtcgcactaggggtgggattcaaactactggtcaaagaccattttgtacagaaaagggaacatctccgatgggtgttaaggtaggagtttccatgcagccctttatgtctgagaaatagtctcctctgccattggggtccctgcggaatcttctacaggaattgcagctcttcacgtcatgctaggttaccagcatgggcttcccagagcacttcactctgtttctaactccactgacttttctgacttgtttcttgagggacttggaaaaggggaaggtattattcacacagatgtgtgtatgaagcctaaataacatccaactttttttccaaaaacatagtaagagtttaaccataaatagaagagtaatattcctttaaatttcttacaggcatgtaaaattttatgtgtttatagagagatgctaactgtcagcatatagtatttatattggggcaagaagggttaaatcaaatctttaatttaagtaagcatagttcctttaaagatcagtagtatttatactctgaaaagagtaccaagcttagttcagttatttattcatccattttttttctattgtttctcctctggggggaaatggtgttttgtttttgtttgagttttgtgttttagttttttggttttggttttgttttgtttttttgtcattcagattcactaaatttggggatggttttattaaagtatattaacttctttttaaccaaagctttctgaatatgaccagcctcaggtgctagcgcattaaagagcaactaaacctaattccagtgtcgatttgtgaaataataaaagctaattgaatttctctaagggtgagagagaacataatgatgaacttaaaaagaaattccttttcccagaagggattctgcatgtacctacaaacaatcatgctctaaccacagtaatagtcatgccatggtgacattgcttttacggtaaaccaagataggtaatatgatgcttcttcccaggtgtttctgaaagaaaagcagcggtggagcttaagagccaagtccactgattgacataataggatggaattgtagacagagacatgctccatgaaacaaggaaacaactgactactatttggatctaagttgggatctgatgttaaacaataaattcagtttaaaaaaaatatggagctcagaaaaggatgtgaaaaactttgcattttcctttcttcattattacaaaaacacctatgtgatgacataaaatacttgggtgatatcagaacaattatccttaatagtttttataattaaagtttcctaaacttcagtctccaatagtcttttaaggattggaaccacatcactgtcagccccgctgctacaatgcctttgtacaatttttttacataaggcaaataaggcttttgtacaaagcctgaataccttctgttccaatggtgtccaaatggttattatattgtgaaaaacctggccttggtcacaatgcaaacaaaagtacagatgaaagtgctttttggacagtttgcaaattgtgttaaagctacggattttttttaaagtgttcagcatcttaacgtgtattaaagctatggatttttttttaaagtcttcagcatcctaattcaccctttctaacttaagaaaaacatgacttaagacactgcttctaagtttggttgttctttatagtgtggatacccagttatctgtgagcgtatgggggtgggctgagggtcaggtgaggaaggagtgtgtgtgtgtgtgtgtgtgtgtgtgtgtgtgtgtgtgatttgcatgtgtatgatgtgtgtgcgtcggaccgcttctaggctactaagtgtcaatggaaaagaaaatgtattcaaaatacttaaatcaaaactagaagatggggaaaaaaagatttattctatacaaagccttgtctggaccactttagagagacttctatttttttaacccttctataaatatttgatggcacttgaaatattcctgcaataaaatgtgatttgtgtaaagaaaaaaagattttgtaatgtgaaacaaagaaagaaagtaatgtaattttctaaaaaaaaaaatacaaacaaacaaactttgtattattttcttgatggaatttgtctatctgtctttggaaaactttttatttcattgaatgtgccatagtagaaatgtgtgtttttagttttagactaaggaatagctagttgttgtgttccgacattccaaaatgcaaaacaacctagtagtatctttcatgaaaaggtttaagtagtatgtaagcttctctcattgttgcttttttgcacatgttcttcattcctctctagtgcaatatgtacatagagcacttgcgggtgtaccttgatccctcagggaaaaatacatatttgtacagttttttggggtttttttgttttttggttttttttgttttgccttttgtttttggctaaggaatgtcgatcgaatcacttgttattgttgaggggcagccagataataatcctaaagccactgtttccaacattgattgtttaaatcatatgtccttccaatgctattattttaagataataataaaaagttattttctgacagttctttgtgctgactggtgaaaaacaagggtaaataagcaccttataattgacttactgtgaatgacaatccatcttggtatcaacgatagaagccctatcattttggagttggggttaagagtcagaaacaatgtgctcagggatctcctaaaactcttaaaacagggtggccagtactactgggacaaattgtgttttttattattaataataatgataataatactatccctccaaggcacaagtgaactatatagaactgcgtgtgtgtaaactctttactctcgtctcattttgttgagtttagaacttgatgtgctcgtcagtcttgtgtttcaaaacactgaataacttccaaagcaaagttatgccagtgtgttcaaaagataaattaataatgtaccagcaaagagcatcattcaaagtatagtccttgcatattccagttaccatttctctaataattaaaatattcatgataaatatatatatagcatcatatgttaaaaactatttcaaattctacatattaaggatgaaaattttaaaatccagtaataagaggagagacctgcctatcagtacagtgatataggtaaaagatgaaatatgtttttaaaataccagcaattaactattgttttcatgggttctcctctagaagcaaaccaaaaattccttcatggaaaacaattcttacttctacatgtgtagtttatatctgatgcattacaagagctaatgtttaaagacaaaacaaaacctgcctgtatgacagcagcaactcgagccaacatttagtgttacatgttatatttttgaaataccgttttgttatcatattccacatattactttccataaagtcagagaagttcaatgtaattgttggctctgattcttccaccttgggatacacattcacaagaagatttatatattttcttactatgatagaggaacataatctgggaaaacttcccatgtctgtaagatgaaaaggatacctttaccatgttgtttttgataataaagaatatggaaaatggtagaaatctctcctctctatgtgtatttgtatatgtgtgtatacacacacacgttgacatttttacataacatgtgattgccacttcttataaagttatgatatagaaccccatgaaaacaactttatattatagatcaaataatgtgcccagaaacgcaattgcaacagtaaatcttgatctattggtaagagtctatgatacaggtcttcattctatccctaaacataatgttagtaaagaggttccatcagattgtattatagagaccttcctattgctatttatttttaagagatgagaagactgactagcaatgtctccacagtgcaattggtttcacttctgggtctgtctgtctgtttgtgtaggtgagatcagtgttgtcaggctctcagaataatttttaaaagaatccagaagcctgacttcacaccaagtagccatcctagatgggcgggggggatctccatgttcaaccaaaccctcagaacttagagcaataaatacattcagtcatttatttataaatgaatgacagaatattcaatccaaatagaaacaaccttttgtcagtgatgcaacataacatggagtcttatattgagaaagtgaatatgaatattttaaatagatgcctaggaaatctgtgtttgctgtttacatttaatgtactttgccacattagcagtaccacacttcttttactttcatccttctaagaactaatgaaagatagcttgctattagctttgacatgttgcacatgccattatgttgttctctaagaacaactaaattctctccagtgttcatgtgtgattcctttttcatcattattactttaatgtggatgaatactatttctaggaacttgattatcactgaacagattgcatatgtaaatgcagataattcttgagcaatatagtgaaaatgatttcacaaaaaaaatccatatgtactgtatacatcttcctgaatccaaaattctcctgttatccacacagtttgaaatctcatattaaacagtggtaaatttttaaacattaggacattagctggctgcttctataaatgtacctgtattgtctgcctgctccttttgtggagatgtgtttttgtattggatgtttgggccaatgggaggcttcaagctacaacatattttcccactttaaataatatttaacatatgacaaaccccagacaaggcttttaatatgtataaagaactgcagtgttaggtggtttatttgcaaactgttttcagtgttgtccatttttatggcacctttaacaatattcttgtttccaaagtacaaaaaaaataggttaaataatctagccataactgaatgtcaagcaataaaacaaatgacttttgtgcatagacttaaaaaatacaaattttagacatctgcatgtaaatgcaatctcttgtttactgctttcttcaacttgagcaatcgattccttatttactattaacttaagaacttgtaacggcctgtaaacattttctctcttactcttctttcaaatttacctgtccctgcttttgagtcataatatttaatgttgttctgcacatctctatacagttaactttttggctttcattctgtatagataagaaaatgttatattataaacagcctactcagtgcaaatatttatctgtttatcaaatccacaatatgctgtataataccggttttactatataatctattttagacatagctgtttagaactagagtgtgctatttttgtgtttttctgatgtgtggtgctagacaagttacttttgtgaacaacaaaaattatcccttttattcctagacaataccacctttgggtcttgttaatttcactgagtataactatatatttgtatatatatacatatatatatatatctacctatgcccaactggcagctgtatcagagtgctggatttgggacatgcttttctctttaaatacataatatcattatataaattattctagagtgtatttaattaggataaaattacttccttagtatggatatttgacatctatagggtgaatttgtttataaatatggctatatggaaacttattagcatttactttatgtttgctacttggctttacagcatatctcctaagctgaaaaataatttgccaggccttcaagatcctaaagaaacttgtttaatggagtaatatacttttttttcttattaaggaattgtattactggcacctaacacagttgtattcttagctcctattatagataatgggcatttacataaaatatcctagatggcttgatggcagaataaacctttcccctcctacctgagtcatgagaaggatggagacgtcctctgccataacatgggccataaagcaaattcgacatgggatgttctgtttcagtatgacctcaaccagttccatgaactgagtgaaggaccttcattttcaaagttatttaataagtagcttaattaagcctttctacccattctcccaagatctactggcattattgaaaagcaaagtttatcaaatatctaactaaggatgtagttaaccttattaaatattgattagaattgttctgtaatattactgaatttgtaagatctttagcaaagatttttgagcaatttataaatgtagagcaaatgtttctgtttactgcactttttgtaactgaaggtgataaattctcaagccatgattattggcttccatgcactgcaatatttatccacaattctagacattttccatttttgtggaagagttgctgttaccttaattataaatgcaattgtgtggttaatgagagctaatgctagtagttaaccttttaaagtggattggctacagttgagggagaaatctcttttaatataaatcacatcattccttaactgcctctcttggaaagagattgaaaccttttttttaaagcacgatttagcatcctaagcttcctgagggtagagattgtatctttttgcgtctgcacaatggctagcacatgtcagcatttgacaattgttaaatgataacaagtgtgccccaattaaaacgtttttcctgggttgttttgttaaatttacaaagtaagccaagccttacggttaacattctcctctacaaccaagtattaaagccacatttaaaaagaccacatgaaatgctgattctaattgtgtgtaggtcttgaggattaagcacacaaatttcacaaacttctgtttgagtaaacaaactcagccttctgtaaatatacatgcaagtttggaaacagtaatactgtacctataaatatatgctgtctgttttgtgtacagtatgtaaaaactccttttctgccacactaaaaatgcaagccatttatgggaatcctaaaactagtattgaactaaaactttgctaatgatctttattagaggatcgtccaacttttcacttaccttgggttttcttttcaattcactcttacactagtctgcttatttccagctgtttattttattgagtcctgaatttaaaaaaaaaatattttgattcattttgtaaatacaagctgtacaaaaaagagagatttaatgttgtcttttaaatactccaattttcattctaatatgaatgttgttatattgtacttagaaactgtacctttaatattacattacctttattaaaagtgcattgaacacatcaattttagatgtgctttatgtactgttatcctataataaaacttcagcttctaatggaa

SEQ ID NO: 1493 - DNA, 3604 bp, Homo sapiens
tctctcccctctctttctctctcgctgctcccttcctccctgtaactgaacagtgaaaattcacattgtggatccgctaacaggcacagatgtcatgtgaaaacgcacatgctctgccatccacaccgcctttctttcttttctttctgtttccttttttcccccttgttccttctccctcttctttgtaactaacaaaaccaccaccaactcctcctcctgctgctgcccttcctcctcctcctcagtccaagtgatcacaaaagaaatcttctgagccggaggcggtggcattttttaaaaagcaagcacattggagagaaagaaaaagaaaaacaaaaccaaaacaaaacccaggcaccagacagccagaacatttttttttcacccttcctgaaaacaaacaaacaaacaaacaatcatcaaaacagtcaccaccaacatcaaaactgttaacatagcggcggcggcggcaaacgtcaccctgcagccacggcgtccgcctaaagggatggttttctcggcagagcagctcttcgccgaccaccttcttcactcgtgctgagcgggatttttgggctctccggggttcgggctgggagcagcttcatgactacgcggagcgggagagcggccacaccatgcgagcacaaattgaagtgataccatgcaaaatttgtggcgataagtcctctgggatccactacggagtcatcacatgtgaaggctgcaagggattctttaggaggagccagcagaacaatgcttcttattcctgcccaaggcagagaaactgtttaattgacagaacgaacagaaaccgttgccaacactgccgactgcagaagtgtcttgccctaggaatgtcaagagatgctgtgaagtttgggaggatgtccaagaagcaaagggacagcctgtatgctgaggtgcagaagcaccagcagcggctgcaggaacagcggcagcagcagagtggggaggcagaagcccttgccagggtgtacagcagcagcattagcaacggcctgagcaacctgaacaacgagaccagcggcacttatgccaacgggcacgtcattgacctgcccaagtctgagggttattacaacgtcgattccggtcagccgtcccctgatcagtcaggacttgacatgactggaatcaaacagataaagcaagaacctatctatgacctcacatccgtacccaacttgtttacctatagctctttcaacaatgggcagttagcaccagggataaccatgactgaaatcgaccgaattgcacagaacatcattaagtcccatttggagacatgtcaatacaccatggaagagctgcaccagctggcgtggcagacccacacctatgaagaaattaaagcatatcaaagcaagtccagggaagcactgtggcaacaatgtgccatccagatcactcacgccatccaatacgtggtggagtttgcaaagcggataacaggcttcatggagctctgtcaaaatgatcaaattctacttctgaagtcaggttgcttggaagtggttttagtgagaatgtgccgtgccttcaacccattaaacaacactgttctgtttgaaggaaaatatggaggaatgcaaatgttcaaagccttaggttctgatgacctagtgaatgaagcatttgactttgcaaagaatttgtgttccttgcagctgaccgaggaggagatcgctttgttctcatctgctgttctgatatctccagaccgagcctggcttatagaaccaaggaaagtccagaagcttcaggaaaaaatttattttgcacttcaacatgtgattcagaagaatcacctggatgatgagaccttggcaaagttaatagccaagataccaaccatcacggcagtttgcaacttgcacggggagaagctgcaggtatttaagcaatctcatccagagatagtgaatacactgtttcctccgttatacaaggagctctttaatcctgactgtgccaccggctgcaaatgaaggggacaagagaactgtctcatagtcatggaatgcatcaccattaagacaaaagcaatgtgttcatgaagacttaagaaaaatgtcactactgcaacattaggaatgtcctgcacttaatagaattatttttcaccgctacagtttgaagaatgtaaatatgcacctgagtggggctcttttatttgtttgtttgtttttgaaatgaccataaatatacaaatataggacactgggtgttatcctttttttaattttattcgggtatgttttgggagacaactgtttatagaattttattgtagatatatacaagaaaagagcggtactttacatgattacttttcctgttgattgttcaaatataatttaagaaaattccacttaataggcttacctatttctatgtttttaggtagttgatgcatgtgtaaatttgtagctgtcttggaaagtactgtgcatgtatgtaataagtatataatatgtgagaatattatatatgactattacttatacatgcacatgcactgtggcttaaataccatacctactagcaatggaggttcagtcaggctctcttctatgatttaccttctgtgttatatgttacctttatgttagacaatcaggattttgttttcccagccagagttttcatctatagtcaatggcaggacggtaccaactcagagttaagtctacaaaggaataaacataatgtgtggcctctatatacaaactctatttctgtcaatgacatcaaagccttgtcaagatggttcatattgggaaggagacagtattttaagccattttcctgtttcaagaattaggccacagataacattgcaaggtccaagacttttttgaccaaacagtagatattttctatttttcaccagaacacataaaaacactttttttcttttggatttctggttgtgaaacaagcttgatttcagtgcttattgtgtcttcaactgaaaaatacaatctgtggattatgactaccagcaatttttttctaggaaagttaaaagaataaatcagaacccagggcaacaatgccatttcatgtaaacattttctctctcaccatgttttggcaagaaaaggtagaaagagaagacccagagtgaagaagtaattctttatattcctttctttaatgtatttgttaggaaaagtggcaataaagggggaggcatattataaaatgctataatataaaaatgtagcaaaaacttgacagactagaaaaaaaaagatctgtgttattctagggaactaatgtaccccaaagccaaaactaattcctgtgaagtttacagttacatcatccatttaccctagaattatttttttagcaacttttagaaataaagaatacaactgtgacattaggatcagagattttagacttccttgtacaaattctcacttctccacctgctcaccaatgaaattaatcataagaaaagcatatattccaagaaatttgttctgcctgtgtcctggaggcctatacctctgttattttctgatacaaaataaaacttaaaaaaaagaaaacaagctaa

SEQ ID NO: 1494 - DNA, 3084 bp, Homo sapiens
gccaggtgctcccgccttccaccctccgccctcctccctcccctgggccctgctccctgccctcctgggcagccagggcagccaggacggcaccaagggagctgccccatggacagggccccacagagacagcaccgagcctcacgggagctgctggctgcaaagaagacccacacctcacaaattgaagtgatcccttgcaaaatctgtggggacaagtcgtctgggatccactacggggttatcacctgtgaggggtgcaagggcttcttccgccggagccagcgctgtaacgcggcctactcctgcacccgtcagcagaactgccccatcgaccgcaccagccgaaaccgatgccagcactgccgcctgcagaaatgcctggcgctgggcatgtcccgagatgctgtcaagttcggccgcatgtccaagaagcagagggacagcctgcatgcagaagtgcagaaacagctgcagcagcggcaacagcagcaacaggaaccagtggtcaagacccctccagcaggggcccaaggagcagataccctcacctacaccttggggctcccagacgggcagctgcccctgggctcctcgcctgacctgcctgaggcttctgcctgtccccctggcctcctgaaagcctcaggctctgggccctcatattccaacaacttggccaaggcagggctcaatggggcctcatgccaccttgaatacagccctgagcggggcaaggctgagggcagagagagcttctatagcacaggcagccagctgacccctgaccgatgtggacttcgttttgaggaacacaggcatcctgggcttggggaactgggacagggcccagacagctacggcagccccagtttccgcagcacaccggaggcaccctatgcctccctgacagagatagagcacctggtgcagagcgtctgcaagtcctacagggagacatgccagctgcggctggaggacctgctgcggcagcgctccaacatcttctcccgggaggaagtgactggctaccagaggaagtccatgtgggagatgtgggaacggtgtgcccaccacctcaccgaggccattcagtacgtggtggagttcgccaagaggctctcaggctttatggagctctgccagaatgaccagattgtgcttctcaaagcaggagcaatggaagtggtgctggttaggatgtgccgggcctacaatgctgacaaccgcacggtcttttttgaaggcaaatacggtggcatggagctgttccgagccttgggctgcagcgagctcatcagctccatctttgacttctcccactccctaagtgccttgcacttttccgaggatgagattgccctctacacagcccttgttctcatcaatgcccatcggccagggctccaagagaaaaggaaagtagaacagctgcagtacaatctggagctggcctttcatcatcatctctgcaagactcatcgccaaagcatcctggcaaagctgccacccaaggggaagcttcggagcctgtgtagccagcatgtggaaaggctgcagatcttccagcacctccaccccatcgtggtccaagccgctttccctccactctacaaggagctcttcagcactgaaaccgagtcacctgtggggctgtccaagtgacctggaagagggactccttgcctctccctatggcctgctggcccacctccctggaccccgttccaccctcacccttttcctttcccatgaaccctggagggtggtccccaccagctctttggaagtgagcagatgctgcggctggctttctgtcagcaggccggcctggcagtgggacaatcgccagagggtggggctggcagaacaccatctccagcctcagctttgacctgtctcatttcccatattccttcacacccagcttctggaaggcatggggtggctgggatttaaggacttctgggggaccaagacatcctcaagaaaacaggggcatccagggctccctggatgaatagaatgcaattcattcagaagctcagaagctaagaataagcctttgaaatacctcattgcatttccctttgggcttcggcttggggagatggatcaagctcagagactggcagtgagagcccagaaggacctgtataaaatgaatctggagctttacattttctgcctctgccttcctcccagctcagcaaggaagtatttgggcaccctaccctttacctggggtctaaccaaaaatggatgggatgaggatgagaggctggagataattgttttatgggatttgggtgtgggactagggtacaatgaaggccaagagcatctcagacatagagttaaaactcaaacctcttatgtgcactttaaagatagactttaggggctggcacaaatctgatcagagacacatatccatacacaggtgaaacacatacagactcaacagcaatcatgcagttccagagacacatgaacctgacacaatctctcttatccttgaggccacagcttggaggagcctagaggcctcaggggaaagtcccaatcctgagggaccctcccaaacatttccatggtgctccagtccactgatcttgggtctggggtgatccaaataccaccccagctccagctgtcttctaccactagaagacccaagagaagcagaagtcgctcgcactggtcagtcggaaggcaagatcagatcctggaggactttcctggcctgcccgccagccctgctcttgttgtggagaaggaagcagatgtgatcacatcaccccgtcattgggcaccgctgactccagcatggaggacaccagggagcagggcctgggcctgtttccccagctgtgatcttgcccagaacctctcttggcttcataaacagctgtgaaccctcccctgagggattaacagcaatgatgggcagtcgtggagttgggggggttgggggtgggattgtgtcctctaaggggacgggttcatctgagtaaacataaaccccaacttgtgccattctttataaaatgattttaaaggcaaaaaaaaaaaaaaaaaaaa

SEQ ID NO: 1495 - DNA, 3054 bp, Homo sapiens
agagagctaggtgcagagcttcaggctgaggcgctgctgagagggcctcgccccgcctctgccgccagctgcaccccactcctggaccaccccctgctgagaaggacagggagccaaggccggcagagccaaggctcagtcatgagaacacaaattgaagtgatcccttgcaaaatctgtggggacaagtcgtctgggatccactacggggttatcacctgtgaggggtgcaagggcttcttccgccggagccagcgctgtaacgcggcctactcctgcacccgtcagcagaactgccccatcgaccgcaccagccgaaaccgatgccagcactgccgcctgcagaaatgcctggcgctgggcatgtcccgagatgctgtcaagttcggccgcatgtccaagaagcagagggacagcctgcatgcagaagtgcagaaacagctgcagcagcggcaacagcagcaacaggaaccagtggtcaagacccctccagcaggggcccaaggagcagataccctcacctacaccttggggctcccagacgggcagctgcccctgggctcctcgcctgacctgcctgaggcttctgcctgtccccctggcctcctgaaagcctcaggctctgggccctcatattccaacaacttggccaaggcagggctcaatggggcctcatgccaccttgaatacagccctgagcggggcaaggctgagggcagagagagcttctatagcacaggcagccagctgacccctgaccgatgtggacttcgttttgaggaacacaggcatcctgggcttggggaactgggacagggcccagacagctacggcagccccagtttccgcagcacaccggaggcaccctatgcctccctgacagagatagagcacctggtgcagagcgtctgcaagtcctacagggagacatgccagctgcggctggaggacctgctgcggcagcgctccaacatcttctcccgggaggaagtgactggctaccagaggaagtccatgtgggagatgtgggaacggtgtgcccaccacctcaccgaggccattcagtacgtggtggagttcgccaagaggctctcaggctttatggagctctgccagaatgaccagattgtgcttctcaaagcaggagcaatggaagtggtgctggttaggatgtgccgggcctacaatgctgacaaccgcacggtcttttttgaaggcaaatacggtggcatggagctgttccgagccttgggctgcagcgagctcatcagctccatctttgacttctcccactccctaagtgccttgcacttttccgaggatgagattgccctctacacagcccttgttctcatcaatgcccatcggccagggctccaagagaaaaggaaagtagaacagctgcagtacaatctggagctggcctttcatcatcatctctgcaagactcatcgccaaagcatcctggcaaagctgccacccaaggggaagcttcggagcctgtgtagccagcatgtggaaaggctgcagatcttccagcacctccaccccatcgtggtccaagccgctttccctccactctacaaggagctcttcagcactgaaaccgagtcacctgtggggctgtccaagtgacctggaagagggactccttgcctctccctatggcctgctggcccacctccctggaccccgttccaccctcacccttttcctttcccatgaaccctggagggtggtccccaccagctctttggaagtgagcagatgctgcggctggctttctgtcagcaggccggcctggcagtgggacaatcgccagagggtggggctggcagaacaccatctccagcctcagctttgacctgtctcatttcccatattccttcacacccagcttctggaaggcatggggtggctgggatttaaggacttctgggggaccaagacatcctcaagaaaacaggggcatccagggctccctggatgaatagaatgcaattcattcagaagctcagaagctaagaataagcctttgaaatacctcattgcatttccctttgggcttcggcttggggagatggatcaagctcagagactggcagtgagagcccagaaggacctgtataaaatgaatctggagctttacattttctgcctctgccttcctcccagctcagcaaggaagtatttgggcaccctaccctttacctggggtctaaccaaaaatggatgggatgaggatgagaggctggagataattgttttatgggatttgggtgtgggactagggtacaatgaaggccaagagcatctcagacatagagttaaaactcaaacctcttatgtgcactttaaagatagactttaggggctggcacaaatctgatcagagacacatatccatacacaggtgaaacacatacagactcaacagcaatcatgcagttccagagacacatgaacctgacacaatctctcttatccttgaggccacagcttggaggagcctagaggcctcaggggaaagtcccaatcctgagggaccctcccaaacatttccatggtgctccagtccactgatcttgggtctggggtgatccaaataccaccccagctccagctgtcttctaccactagaagacccaagagaagcagaagtcgctcgcactggtcagtcggaaggcaagatcagatcctggaggactttcctggcctgcccgccagccctgctcttgttgtggagaaggaagcagatgtgatcacatcaccccgtcattgggcaccgctgactccagcatggaggacaccagggagcagggcctgggcctgtttccccagctgtgatcttgcccagaacctctcttggcttcataaacagctgtgaaccctcccctgagggattaacagcaatgatgggcagtcgtggagttgggggggttgggggtgggattgtgtcctctaaggggacgggttcatctgagtaaacataaaccccaacttgtgccattctttataaaatgattttaaaggcaaaaaaaaaaaaaaaaaaaa

SEQ ID NO: 1496 - DNA, 1951 bp, Homo sapiens
cgcctgcttttgcccgggtcctgagaacaggggctccccacactttttttttttttggttttgttttatttcgtttccgcgcgtctctttctactgcaaacagaaatgggagggtggacaggcgggtaggagcggatcagacgcccaggacgcagcagcccgagtccgcacagggtttgcgggaggtggtgaccgcgctggggacgccaggacgcgaatgaacctccggggcgcgctcggggcctgcgctcagagcttggaaaactggagtttgcttttcctccggccacggagagaacgcgggtaacctgtgtggggggctcgggcgcctgcgcccccctcctgcgcgcgcgctctcccttccaaaaatgggatctttcccccttcgcaccaaggtgtacggacgccaaacagtgatgaaatgagaagaaagccaattgccggcctggggggtgggggagacacagcgtctctgcgtgcgtccgccgcggagcccggagaccagtaattgcaccagacaggcagcgcatggggggctgggcgaggtcgccgcgtataaatagtgagatttccaatggaaaggcgtaaataacagcgctggtgatccacccgcgcgcacgggccgtcctctccgcgcggggagacgcgcgcatccaccagccccggctgctcgccagccccggccccagccatggaagagctcacggcttttgtatccaagtcttttgaccagaaaagcaaggacggtaacggcggaggcggaggcggcggaggtaagaaggattccattacgtaccgggaagttttggagagcggactggcgcgctcccgggagctggggacgtcggattccagcctccaggacatcacggagggcggcggccactgcccggtgcatttgttcaaggaccacgtagacaatgacaaggagaaactgaaagaattcggcaccgcgagagtggcagaagggatttatgaatgcaaagagaagcgcgaggacgtgaagtcggaggacgaggacgggcagaccaagctgaaacagaggcgcagccgcaccaacttcacgctggagcagctgaacgagctcgagcgactcttcgacgagacccattaccccgacgccttcatgcgcgaggagctcagccagcgcctggggctctccgaggcgcgcgtgcaggtttggttccagaaccggagagccaagtgccgcaaacaagagaatcagatgcataaaggcgtcatcttgggcacagccaaccacctagacgcctgccgagtggcaccctacgtcaacatgggagccttacggatgcctttccaacagatggagttttgctcttgtcgcccgggctggagtataatggcatgatctcgactcactgcaacctccgcctcccgagttcaagcgattctcctgcctcagcctcccgagtagctgggattacaggtgcccaccaccatgtcaagataatgtttgtattttcagtagagatggggtttgaccatgttggccaggctggtctcgaactcctgacctcaggtgatccacccgccttagcctcccaaagtgctgggatgacaggcgtgagcccctgcgcccggcctttgtaactttatttttaattttttttttttttttaagaaagacagagtcttgctctgtcacccaggctggagcacactggtgcgatcatagctcactgcagcctcaaactcctgggctcaagcaatcctcccacctcagcctcctgagtagctgggactacaggcacccaccaccacacccagctaatttttttgatttttactagagacgggatcttgctttgctgctgaggctggtcttgagctcctgagctccaaagatcctctcacctccacctcccaaagtgttagaattacaagcatgaaccactgcccgtggtctccaaaaaaaggactgttacgtgga

SEQ ID NO: 1497 - DNA, 1842 bp, Homo sapiens
gctatcgatcaagggtaaaattccattctgatatcaaaatgcagtattcgcaccactgtgagcaccttttagagagactgaacaaacagcgggaagcaggttttctctgtgactgtaccatagtgattggggaattccagtttaaagctcataggaatgtgctggcctcctttagtgagtattttggtgcgatctacagaagcacttctgagaacaatgtctttcttgatcagagtcaggtgaaggctgatggatttcagaaactgttggagtttatatacacaggaactttaaatcttgacagttggaatgttaaagaaattcatcaggctgctgactatctcaaagtggaagaggtggtcactaaatgcaaaataaagatggaagattttgcttttattgctaatccttcttctacagagatatctagtattactggaaacattgaattgaatcaacagacttgtcttcttactctgcgagattataataatcgagagaaatcagaagtatctacagatttgattcaggcaaatcctaaacaaggcgcgttagcgaaaaagtcatctcaaacgaaaaagaagaagaaggctttcaactccccgaaaacagggcagaataaaacagtgcgatatcccagtgacatcttagagaatgcatctgttgaattattcctagatgcaaataaactgcccacaccagtagtagaacaagttgcacaaataaatgataattcagaactcgagttgacatcagttgtggaaaatacttttccagcacaagatattgtgcacactgttacagtgaaacggaaacgtggaaaatcacagccaaactgtgctctgaaagaacactctatgtctaatatagccagcgtcaagagtccttatgaggcggagaactccggggaagagctggatcagaggtattccaaggccaagccaatgtgtaacacatgtgggaaagtgttttcagaagccagcagtttgagaaggcacatgagaatacataaaggagtcaaaccttacgtctgccacttatgtggaaaggcatttacccaatgtaaccagctgaaaacgcatgtaagaactcatacaggtgagaagccatacaaatgtgaattgtgtgataaaggatttgctcagaaatgtcagctagtcttccatagtcgcatgcatcatggtgaagaaaaaccctataaatgtgatgtatgcaacttacagtttgcaacttctagcaatctcaagattcatgcaaggaagcatagtggagagaagccatatgtctgtgataggtgtggacagagatttgctcaagccagcacactgacctatcatgtccgtaggcatactggagaaaagccttatgtatgtgatacctgtgggaaggcatttgctgtctctagttctcttatcactcattctcgaaaacatacaggtgaaaaaccatacatatgtggtatttgtgggaaaagttttatttcctcaggagagctcaacaaacactttcggtcccatacaggtgcagataaaactctagactccagtgcagaggatcatactttgagtgaacaggattccatacaaaaaagtcctttatcagaaactatggatgtgaagccttctgatatgactttaccattagctcttccacttgggactgaggaccatcacatgcttctgcctgtcacggatactcagtctcctacatcagatacattgttgaggtcaactgtgaatgggtattcagaaccacagttgatttttttacaacaattatactgactttgtaaggaatatggaattgctaagatatcattggtagcaaacatctctggtaagg

SEQ ID NO: 1498 - DNA, 3576 bp, Homo sapiens
  modified_base (1261)..(1261): a, c, t, g, unknown or other
  modified_base (1307)..(1307): a, c, t, g, unknown or other
  modified_base (2728)..(2728): a, c, t, g, unknown or other
  modified_base (3454)..(3454): a, c, t, g, unknown or other
  modified_base (3569)..(3569): a, c, t, g, unknown or other
gaattccgggtggctgcgctgcccttggtgactgcaagcccctcactgccttcctggaacccaagaacrrctttcttcacaggggccccacccagcctccacctccccatgtctcgatcaagttggagcccgccagtagctttgcggtggacttcaatgagcccctggacttctcgcagaagggcctggcctggtccaagtgaagcaggaaaacatctcctttctgagcccttcttccctggtcccctatgactgctccatggagcccatcgacctgtccatccccaagaacttcaggaaaggggacaaggatttggccactcccagcgaasscaagaagcctgaggaggaggcggggagcagcgagcagccctctccctgcccagcacccggcccttctcttcctgtaactttggggcccagcggaatcctggaaagccccatggcccctgctccggcggccaccccggaacccccagcacagcccctgcagggccctgttcagctggcggtcccaatctactcctcagccctggtcagcagccctccactcgtgggcagctcagccctcctgagtggcacagccttgctgcgtccactgcggcccaagcccccgctgcttttgccaaagccccccgtgacagaagagctgcccccgctggcctccattgcccagatcatctcatctgtatcctcggcccccaccctgctgaaaaccaaggtggcggacccagggcccgcaagcactggcagtaacaccacggcttcagacagcttaggaggttctgtccccaaagccgccaccaccgccacccccgctgccaccaccagcccaaaagagtctagtgagcctcccgctccagccagcagcccagaggctgcctctcccaccgagcagggcccagcgcggacgtcgaagaagaggggccggaaaagggggatgaggagccgaccccgcgccaacagcggcggggtggacctggactccagcggggagtttgccagcatcgagaagatgctggccaccacagacaccaacaagttcagtccgtttctgcagacagcggaggacaacactcaggatgaggtggccggagcccctgccgaccaccatgggcccagtgatgaagagcagggcagtcccccagaagacaagctgctgagggccaagcggaactcgtacaccaactgcctgcagaagatcacctgtccccactgtccccgggttttcccttgggccagctccctacagaggcacatnctcacacacactgacagtcagtcggatgcggagactgcagccgccncgggcgaagtgctagacctcacctcacgggacagagagcagccgtcggagggcgccactgagctccgccaggtcgcaggggatgcgcctgtggagcaggccacggcggaaacggcctcgccggtgcaccgggaagagcacgggcgtggggagagccatgagccggaggaggagcatggcactgaggagagcactggggacgccgacggcggaagaggacgcgtcgagcaaccagagcctggacctggacttcgccaccaagctcatggacttcaagctggcggagggcgacggcgaggcaggcccgggggcgcggcctcgcaggagcagaagctcgcctgcgacacctgtgggaagagcttcaagttcctgggcaccctgagccgccaccggaaggcgcacggccgccaggagcccaaggacgagaagggagatggcgccacgactgcagaggagggscccagccctgcccctgaacaggaggagaagccscccgagaccccggcagaggtggtggagtcggccccgggtgccggggaggccccggcggaaaagctcgcggaggagacggagggcccctccgacggggagagcgcggccgagaaaaggtcctcagagaagagcgacgatgacaagaaaccaaagacagactcccccaaaagcgtggccagcaaggcagacaagaggaagaaggtctgcagcgtgtgcaacaagcggttctggtcgctgcaggacctgacccggcacatgcgctcccacacaggggaaaggccatacaaatgtcagacctgcgagcgaaccttcaccttgaagcacagcctggttcgccaccagcggatccaccagaaagccaggcatgccaaacaccacgggaaggacagcgacaaggaagagcggggtgaggaggacagcgagaatgagtccacccacagcggcaacaacgccgtctcagagaacgaggctgagctggctcccaatgccagcaaccacatggctgtcacccggagccggaaggagggcttggccagtgccaccaaggactgcagccacagggaggagaaggtcacggcagggtggccgtctgagcctggccagggtgaccttaacccagagagcccggcggccctggggcaggacctgctggagccgcgcagcaagaggcctgcccacccaatcctggccacagctgatggcgcctcccagcacgtggggatggagtgacagcctcagtccccctcagcacagacaaaagccagcagagcaaagcgtctatacttcatggggtttcctcagtgccctttggctgttgaggagtgagagagagagagagagagagagagagagagagagagagacaagcaggagcgtggctgctcgctcagtgccatagccttaccgcagcctgcgcgggaggcccacagnccgtgccgattccagtgccttaactacttaccggatccctccatattatcatgggtgttgtatttttccaaaatgacttcttaaacaaaacaaatattataatgaattgtctggagaggacctcttcatttgagcattagcgttattttgtattggtgtgtgtgagcttgttcttgtgaatctgtgatagcaccgtttgttctgtgagctggaaacagaaggaaaaaacatacccttgggtacccatagccaataactggaagaaaatgatgtgaatttcatgtaaatgaccagaggaaagatggataagatgataatttcttaaatagacattttccttttttctttgtgcttcatggtggagctgtcatctggtccttggtattacaggatgtggttgatgaaggtttccaatatggtttcaggccaaaaccagggaagattctagcttcagcctcatgtcattccagtctgtcagcattagacatggtcactgttcaagtttcaagacatccattcttaactatagagaagagttactcccctggcgtcttaacctatggaaaacatgcacggataggatatatttgattgcctcctcttccctttcagtatatgtattattaatattattattattattattattattagttcatcagtttgctgttctctgcagtgagcagaatcaaatgggcaatatttgtcctgggagacctgtgccgnacccaggtccccgtgttaacgtgtgcctgcggttgtggttggcaccctcgggtggtagctcttctactgtaatgagacaagcctttcttctgtcactgcagaatttagaaggggnggaattc

SEQ ID NO: 1499 - DNA, 6861 bp, Homo sapiens
gggagagggaagggggcggagctagccggagccgcgagtccattttggggctgtgcttggcgcgtaccgtgcggtccctgtagttggaggacgggcggtcgcgcggcctttcccactagccggaggtcggagataagtacccgccgcccggctcctctcgggaaagcggggtggtcctcgaaccttcagcgagggtggggagttgcccagtagcctctagttcgttagtcaaaacgtgaaaaaaaagacctgctttgccctgggaaatagtaaccctgccaaatacatcagcttgtaggagacagaggatgtgatggagctgcttgaagaagatctcacatgccctatttgttgtagtctgtttgatgatccacgggttttgccttgctcccacaacttctgcaaaaaatgcttagaaggtatcttagaagggagtgtgcggaattccttgtggagaccagctccattcaagtgtcctacatgccgtaaggaaacttcagctactggaattaatagcctgcaggttaattactccctgaagggtattgtggaaaagtataacaagatcaagatctctcccaaaatgccagtatgcaaaggacacttggggcagcctctcaacattttctgcctgactgatatgcagctgatttgtgggatctgtgctactcgtggggagcacaccaaacatgtcttctgttctattgaagatgcctatgctcaggaaagggatgcctttgagtccctcttccagagctttgagacctggcgtcggggagatgctctttctcgcttggataccttggaaactagtaagaggaaatccctacagttactgactaaagattcagataaagtgaaggaattttttgagaagttacaacacacactggatcaaaagaagaatgaaattctgtctgactttgagaccatgaaacttgctgttatgcaagcatatgacccagagatcaacaaactcaacaccatcttgcaggagcaacggatggcctttaacattgctgaggctttcaaagatgtgtcagaacccattgtatttctgcaacagatgcaggagtttagagagaaaatcaaagtaatcaaggaaactcctttacctccctctaatttgcctgcaagccctttaatgaagaactttgataccagtcagtgggaagacataaaactagtcgatgtggataaactttctttgcctcaagacactggcacattcattagcaagattccctggagcttttataagttatttttgctaatccttctgcttggccttgtcattgtctttggtcctaccatgttcctagaatggtcattatttgatgacctggcaacttggaaaggctgtctttcaaacttcagttcctatctgactaaaacagccgatttcatagaacaatcagttttttactgggaacaggtgacagatgggtttttcattttcaatgaaagattcaagaattttactttggtggtactgaacaatgtggcagaatttgtgtgcaaatataaactattataaaatctgtttcaagtatgcagttttcttttgttagaaattgttagagaatagagagtggtaattcagatttggtcaacgattctagtcacatattttcctccaaaagtattccttccaaaaataatctatacatgttcaaattaggtagcataaagataaaagtgaaatttagtagtataggcctgaacctttttttgtttaaaagagtgcttttgaaataagcatccaccccaaatgttggttgtatttatgctgtgataaaaataggtgagagatcatatgatctaatattgtattgatggaagtataggtagtatagtagtgattgttcttcaagcatgcagtaaagatcacttttttttttttttttttttttgagatggagtcttgctctgtcgcccaggctggagtgcagtgatgcaatcttggctcactgcagcctctacctcccaggttcaagtgattatcctgccttagcctcctgagtagctgggattacaggcgcgtgccaccacgcccagctaattttttgtatttttagttgagacagggtttcactgtcccttaagaccatcctgttagccaagatggtcttgatctcctgacctcgtgatccgcctgcctcggcctcccaaagtgctgggattacaggtgtgagccaccgtgcccagccaaagactgctcttaaagcacctttttgacagtgaacatggtctaaaaaagggaagatattgtagaagatttcacacacacacgcgtgtgtgggagacaactaaaggtattgaaggtactaattaattagatttccaaaattttctacagagagttaattatcaccaaaatgtgaatggtacatacaaaacctggcattttcttgtgataagtttacatttttaggagagtggagctttcaatctgcccttttctcctttgtttttgtagttttcaccaaagatgatcaactagaaatgttaagtggctatgcaagcaaaagcatagataggttaaaaaaaaggatcagctggctgggcagggtggctcatgtctataatctcagcattctaggacagtgatgtgggaggattatttgaggctaggagttccagttcgaaaccagcttcgtaaacatagcaagacccagtctctaccaaaaaaaaaaaaaaaaaaaaaaaaaaaaaaaatatatatatatatatacacacacacacacacatatgtacacatacatatatatacatatatatgtatatatagaacacatggcaagagcaggaaatgggaagactaccttttttctggcagctatgtgttgttttgttcgaaagatggcaagtgtacaaccaaaccaatccacttgcttacagaaagaatgtttagtgtagttaagactaatttgacaacagataaaacagtctgtcagctattacaaagtaatcagctgaacactaatgctgttctgtctgctcacaagagataaagataccctctcatggaataaacaccttgcttagaattcatataacaaagaagtaaccttataactgctctctagtctgccttatttgtgtcatagagtaagatattccttgaaagcccattaagtggaatagactttctgaaaataagagttctttacctcagtcctcctctaatttggttgagaggaggtaatgaaaatggggacaggataaaaggtggcaactaaatttaaagcacagaagaaatgatttccttctagctatgagaatagtcaaattgagcttgccaggctgtctcattcctaacatgtaattcatgatttagccactaaatttctaaggagatcataagaaattaagaaaaacgtttaagtctagcctctgcgtggtagacaggtatggggagggagaatgcttttcccctcccagtaataaaaaaaaaaaaaaaaaaaatatatatatatatatatatatatatatatatatatatatatatatatatatatatagttttactaggttttcatggataagtttttaaatgtaagacaggaaagggatctatttgatgtctatcttcagatatattggcagttttccttaagctatttagttcctcatctgttgctttttcattttgtatactgcaagttcccaggcaactcgaatttgcaaacacagccatggatacactatttaccttacagtagtttcctgggaatctaagtctggtttttgttattcttccctcccctccactgcataatcatgtataactagcaacatttatggttataggttgatttcctaagtgtggctgatggtagcctctagtttgaagtgagggaagaatgagtagtcaggaactggtcactttgaatgtgggagggaagatattcacgacaaggttttctacgataaagcagtttcctgcttctcgtttggcacgcatgttagatggcagagaccaagaattcaagatggttggtggccagatttttgtagacagagatggtgatttgtttagtttcatcttagattttttgagaactcaccagcttttattacccactgaattttcagactatcttaggcttcagagagaggctcttttctatgaacttcgttctctagttgatctcttaaacccatacctgctacagccaagacctgctcttgtggaggtacatttcctaagccggaacactcaagcttttttcagggtgtttggctcttgcagcaaaacaattgagatgctaacagggaggattacagtgtttacagaacaaccttcagcgccgacctggaatggtaactttttccctcctcagatgaccttacttccactgcctccacaaagaccttcttaccatgacctggttttccagtgtggttctgacagcactactgataaccaaactggagtcaggtattttgtactttgcagtatttctcttgtataccagtttgtgatgttttctctaaaaacttgaagttcctcaggcctgtaacttctggaaaagatgattattcaaaataatgttttggggtaaccagtggagttgggtagaatgaccaaataattattttccaaactgggatactttttagagtgaaaggggctattattaggtgggacaaaaggaataaatgaagactgcccagaaaaaactgagactatggacattcaaatcatgggagaaaataattttgtagattatgttccattgctaatgaatttgacttagaaaagaattgccttatttttaagagattgtttcagtggttcacataaaggctcgctcactggtttctcttgagttccttacacactatataagttgttctttcagttttatgattcaactactgtttttccttcagctgactttatttttaaacacccttaaagacagatatatctcatggcaaatttggtatcctgttacagccttggctcttaaacaactcaaaatattgggataggctgtcagtatgttaaggatagttgctcctgagtcaattcttcacttactccctctgttgttcttggctggatcctaacgctgatttccactctgctgtcacaaacatttttccccccgtaaaatgtcttaatgctgtcctaccattattttaccaactgtgaaagctggctttaatttttaggaggaaaagaaaagcctgcatgtgttctttattggtatcatttaaaatatacttttttttttttttttggtaaaggtaggcgtattttaagatattttcttaacttgagcagtagccaacaggaaggataccagtgtctctctctcttagcgacacactccttggtcttgcttaccaactggaggacactaggtagaataaccgagtatgacaattcttaattgtttacattttataacttcctgtccttcaaaagagtttgaaatgtcattttgggaaaagagagccagtcaagctagtaggctgattgtgaagaaaatctaataccttatctttatctcaaacctctgtacaactttattttcattgatgggatactttaacaaaaatgaaattttttttggtttttaaaatatgagtgattatgacctctttggggatcatgcttcaaaaagtcagaaacctagagacaaaactgtcattgatttttaagaagaaacacactaggtcaaaagaagatgtcctggaaatatgaagtactctttaaaaaccatgcatttggagaaagtaattgtttccttgaaaaacatgattaaaaactaaaactgggatgttcctgtgtgtacacagtgccaaatggttttccctttttatgttgtgttttagaaacagcacgaaagttttttccattttaaagtgagaaaacattatatttagacttccataattccaaaatcagaagctatttttaaaattagcattttcttgcatcaccaaatggtattcaattgtttgaagctcaaaatttttaccattccataaatgtttgtgaatttttagacagtgccaatttaaaagtagagatagccaatctgaatacggtgaaattatggggatctctggtgattgggatgaaaactctggccttaaaaggtccacttttagtatataattgcctaattagcaatcatttttattttttgctcactccctggtctgaatctatctgtctattcagatattttttggtaggtttggaaaatggagaagtgagcctaattggtgcctaattgtctggtgtatcattcactttattcagtttgttctatcaatatgatttacccctcaaggttaacctagcaggttgctcagttattatctctcaaggtcacagtactagaaatacttggcttgcatctttcagatgccattcatgttatcaagctcaaattatagttggtcacaggattctaaagtctttatttgacttctcctttttgaactggctcaaatggaaaagtgtagttgcttttaaatgttaaaaataagtttaaactttatatttcccattggtttcccctattttgtcctttctttgtgtgcttgaaatattttatttttcagtttgtcctcatagggaatcaagtattttagctaggtgatgtcttgcaagtacgttccactttgttacaatctactatctgtatatactatttgtatcttaattcttttatgagatgttctgtaacatttttctcactttgacaaatgtttttagactgtacagtcaagatctggcgcttgggggtaagtggaatgatttgctaatattgagaatctgttgtatcaaacataataaactttttttgagatgtgaaaaaaaaaaaaaaaaaaaaa

SEQ ID NO: 1500 - DNA, 7311 bp, Homo sapiens
gggagagggaagggggcggagctagccggagccgcgagtccattttggggctgtgcttggcgcgtaccgtgcggtccctgtagttggaggacgggcggtcgcgcggcctttcccactagccggaggtcggagataagtacccgccgcccggctcctctcgggaaagcggggtggtcctcgaaccttcagcgagggtggggagttgcccaggtcagcagggatctgcgtgggttgggggggctggcgaaggccgtctgagctccagtccggcagcgcggcagaaaccagcggggcactgtcatgggcctggggaggagcggcctgcggagggcgccggggcagtgtgtctgtggtccagaaaacctgctccgtccggagccttcctggccccgctaccagcgtctccacatcccctagaaaagaaaagacgggtgtgggccttaggttacagcgcgccgccagcgtttggttgcatggcgccgggggagggcgccctaaccgagaagctgcttaatacaaagagctccaggctcctggcggttcaccaggtctaaacagccgggctttatttgtgggggcgattgaaaaaattgagggtcaagattggggtgctgtgcaaataaatgcgttaatactgttctttttcttctttctttgcagtagcctctagttcgttagtcaaaacgtgaaaaaaaagacctgctttgccctgggaaatagtaaccctgccaaatacatcagcttgtaggagacagaggatgtgatggagctgcttgaagaagatctcacatgccctatttgttgtagtctgtttgatgatccacgggttttgccttgctcccacaacttctgcaaaaaatgcttagaaggtatcttagaagggagtgtgcggaattccttgtggagaccagctccattcaagtgtcctacatgccgtaaggaaacttcagctactggaattaatagcctgcaggttaattactccctgaagggtattgtggaaaagtataacaagatcaagatctctcccaaaatgccagtatgcaaaggacacttggggcagcctctcaacattttctgcctgactgatatgcagctgatttgtgggatctgtgctactcgtggggagcacaccaaacatgtcttctgttctattgaagatgcctatgctcaggaaagggatgcctttgagtccctcttccagagctttgagacctggcgtcggggagatgctctttctcgcttggataccttggaaactagtaagaggaaatccctacagttactgactaaagattcagataaagtgaaggaattttttgagaagttacaacacacactggatcaaaagaagaatgaaattctgtctgactttgagaccatgaaacttgctgttatgcaagcatatgacccagagatcaacaaactcaacaccatcttgcaggagcaacggatggcctttaacattgctgaggctttcaaagatgtgtcagaacccattgtatttctgcaacagatgcaggagtttagagagaaaatcaaagtaatcaaggaaactcctttacctccctctaatttgcctgcaagccctttaatgaagaactttgataccagtcagtgggaagacataaaactagtcgatgtggataaactttctttgcctcaagacactggcacattcattagcaagattccctggagcttttataagttatttttgctaatccttctgcttggccttgtcattgtctttggtcctaccatgttcctagaatggtcattatttgatgacctggcaacttggaaaggctgtctttcaaacttcagttcctatctgactaaaacagccgatttcatagaacaatcagttttttactgggaacaggtgacagatgggtttttcattttcaatgaaagattcaagaattttactttggtggtactgaacaatgtggcagaatttgtgtgcaaatataaactattataaaatctgtttcaagtatgcagttttcttttgttagaaattgttagagaatagagagtggtaattcagatttggtcaacgattctagtcacatattttcctccaaaagtattccttccaaaaataatctatacatgttcaaattaggtagcataaagataaaagtgaaatttagtagtataggcctgaacctttttttgtttaaaagagtgcttttgaaataagcatccaccccaaatgttggttgtatttatgctgtgataaaaataggtgagagatcatatgatctaatattgtattgatggaagtataggtagtatagtagtgattgttcttcaagcatgcagtaaagatcacttttttttttttttttttttttgagatggagtcttgctctgtcgcccaggctggagtgcagtgatgcaatcttggctcactgcagcctctacctcccaggttcaagtgattatcctgccttagcctcctgagtagctgggattacaggcgcgtgccaccacgcccagctaattttttgtatttttagttgagacagggtttcactgtcccttaagaccatcctgttagccaagatggtcttgatctcctgacctcgtgatccgcctgcctcggcctcccaaagtgctgggattacaggtgtgagccaccgtgcccagccaaagactgctcttaaagcacctttttgacagtgaacatggtctaaaaaagggaagatattgtagaagatttcacacacacacgcgtgtgtgggagacaactaaaggtattgaaggtactaattaattagatttccaaaattttctacagagagttaattatcaccaaaatgtgaatggtacatacaaaacctggcattttcttgtgataagtttacatttttaggagagtggagctttcaatctgcccttttctcctttgtttttgtagttttcaccaaagatgatcaactagaaatgttaagtggctatgcaagcaaaagcatagataggttaaaaaaaaggatcagctggctgggcagggtggctcatgtctataatctcagcattctaggacagtgatgtgggaggattatttgaggctaggagttccagttcgaaaccagcttcgtaaacatagcaagacccagtctctaccaaaaaaaaaaaaaaaaaaaaaaaaaaaaaaaatatatatatatatatacacacacacacacacatatgtacacatacatatatatacatatatatgtatatatagaacacatggcaagagcaggaaatgggaagactaccttttttctggcagctatgtgttgttttgttcgaaagatggcaagtgtacaaccaaaccaatccacttgcttacagaaagaatgtttagtgtagttaagactaatttgacaacagataaaacagtctgtcagctattacaaagtaatcagctgaacactaatgctgttctgtctgctcacaagagataaagataccctctcatggaataaacaccttgcttagaattcatataacaaagaagtaaccttataactgctctctagtctgccttatttgtgtcatagagtaagatattccttgaaagcccattaagtggaatagactttctgaaaataagagttctttacctcagtcctcctctaatttggttgagaggaggtaatgaaaatggggacaggataaaaggtggcaactaaatttaaagcacagaagaaatgatttccttctagctatgagaatagtcaaattgagcttgccaggctgtctcattcctaacatgtaattcatgatttagccactaaatttctaaggagatcataagaaattaagaaaaacgtttaagtctagcctctgcgtggtagacaggtatggggagggagaatgcttttcccctcccagtaataaaaaaaaaaaaaaaaaaaatatatatatatatatatatatatatatatatatatatatatatatatatatatatagttttactaggttttcatggataagtttttaaatgtaagacaggaaagggatctatttgatgtctatcttcagatatattggcagttttccttaagctatttagttcctcatctgttgctttttcattttgtatactgcaagttcccaggcaactcgaatttgcaaacacagccatggatacactatttaccttacagtagtttcctgggaatctaagtctggtttttgttattcttccctcccctccactgcataatcatgtataactagcaacatttatggttataggttgatttcctaagtgtggctgatggtagcctctagtttgaagtgagggaagaatgagtagtcaggaactggtcactttgaatgtgggagggaagatattcacgacaaggttttctacgataaagcagtttcctgcttctcgtttggcacgcatgttagatggcagagaccaagaattcaagatggttggtggccagatttttgtagacagagatggtgatttgtttagtttcatcttagattttttgagaactcaccagcttttattacccactgaattttcagactatcttaggcttcagagagaggctcttttctatgaacttcgttctctagttgatctcttaaacccatacctgctacagccaagacctgctcttgtggaggtacatttcctaagccggaacactcaagcttttttcagggtgtttggctcttgcagcaaaacaattgagatgctaacagggaggattacagtgtttacagaacaaccttcagcgccgacctggaatggtaactttttccctcctcagatgaccttacttccactgcctccacaaagaccttcttaccatgacctggttttccagtgtggttctgacagcactactgataaccaaactggagtcaggtattttgtactttgcagtatttctcttgtataccagtttgtgatgttttctctaaaaacttgaagttcctcaggcctgtaacttctggaaaagatgattattcaaaataatgttttggggtaaccagtggagttgggtagaatgaccaaataattattttccaaactgggatactttttagagtgaaaggggctattattaggtgggacaaaaggaataaatgaagactgcccagaaaaaactgagactatggacattcaaatcatgggagaaaataattttgtagattatgttccattgctaatgaatttgacttagaaaagaattgccttatttttaagagattgtttcagtggttcacataaaggctcgctcactggtttctcttgagttccttacacactatataagttgttctttcagttttatgattcaactactgtttttccttcagctgactttatttttaaacacccttaaagacagatatatctcatggcaaatttggtatcctgttacagccttggctcttaaacaactcaaaatattgggataggctgtcagtatgttaaggatagttgctcctgagtcaattcttcacttactccctctgttgttcttggctggatcctaacgctgatttccactctgctgtcacaaacatttttccccccgtaaaatgtcttaatgctgtcctaccattattttaccaactgtgaaagctggctttaatttttaggaggaaaagaaaagcctgcatgtgttctttattggtatcatttaaaatatacttttttttttttttttggtaaaggtaggcgtattttaagatattttcttaacttgagcagtagccaacaggaaggataccagtgtctctctctcttagcgacacactccttggtcttgcttaccaactggaggacactaggtagaataaccgagtatgacaattcttaattgtttacattttataacttcctgtccttcaaaagagtttgaaatgtcattttgggaaaagagagccagtcaagctagtaggctgattgtgaagaaaatctaataccttatctttatctcaaacctctgtacaactttattttcattgatgggatactttaacaaaaatgaaattttttttggtttttaaaatatgagtgattatgacctctttggggatcatgcttcaaaaagtcagaaacctagagacaaaactgtcattgatttttaagaagaaacacactaggtcaaaagaagatgtcctggaaatatgaagtactctttaaaaaccatgcatttggagaaagtaattgtttccttgaaaaacatgattaaaaactaaaactgggatgttcctgtgtgtacacagtgccaaatggttttccctttttatgttgtgttttagaaacagcacgaaagttttttccattttaaagtgagaaaacattatatttagacttccataattccaaaatcagaagctatttttaaaattagcattttcttgcatcaccaaatggtattcaattgtttgaagctcaaaatttttaccattccataaatgtttgtgaatttttagacagtgccaatttaaaagtagagatagccaatctgaatacggtgaaattatggggatctctggtgattgggatgaaaactctggccttaaaaggtccacttttagtatataattgcctaattagcaatcatttttattttttgctcactccctggtctgaatctatctgtctattcagatattttttggtaggtttggaaaatggagaagtgagcctaattggtgcctaattgtctggtgtatcattcactttattcagtttgttctatcaatatgatttacccctcaaggttaacctagcaggttgctcagttattatctctcaaggtcacagtactagaaatacttggcttgcatctttcagatgccattcatgttatcaagctcaaattatagttggtcacaggattctaaagtctttatttgacttctcctttttgaactggctcaaatggaaaagtgtagttgcttttaaatgttaaaaataagtttaaactttatatttcccattggtttcccctattttgtcctttctttgtgtgcttgaaatattttatttttcagtttgtcctcatagggaatcaagtattttagctaggtgatgtcttgcaagtacgttccactttgttacaatctactatctgtatatactatttgtatcttaattcttttatgagatgttctgtaacatttttctcactttgacaaatgtttttagactgtacagtcaagatctggcgcttgggggtaagtggaatgatttgctaatattgagaatctgttgtatcaaacataataaactttttttgagatgtgaaaaaaaaaaaaaaaaaaaaa
